(19) United States
(12) Patent Application Publication
(10) Pub. No.: US 2009/0176226 A1
(43) Pub. Date: Jul. 9, 2009

(54) METHOD FOR DIAGNOSING AUTISM SPECTRUM DISORDER

(75) Inventors: Bai-Lin WU, Newton, MA (US); Yiping SHEN, Lexington, MA (US); David T. MILLER, Westwood, MA (US); Orah S. PLATT, Brookline, MA (US)

Correspondence Address: DAVID S. RESNICK, NIXON PEABODY LLP, 100 SUMMER STREET, BOSTON, MA, 02110-2131, US

(73) Assignee: CHILDREN'S MEDICAL CENTER CORPORATION, Boston, MA (US)

(21) Appl. No.: 12/239,386

(22) Filed: Sep. 26, 2008

Related U.S. Application Data
(60) Provisional application No. 61/018,556, filed on Jan. 2, 2008.

(51) Int. Cl. C12Q 1/68

(52) U.S. Cl. 435/6

(57) ABSTRACT

The present invention provides methods of diagnosing and/or predicting autism spectrum disorder comprising determining the presence of microdeletions and microduplications on chromosomes 15 and 16.

### CROSS REFERENCE TO RELATED APPLICATIONS

[0001] This application claims the benefit under 35 U.S.C. § 119(e) of the U.S. Provisional application No. 61/018,556 filed Jan. 2, 2008, the contents of which are incorporated herein by reference in its entirety.

### BACKGROUND OF INVENTION

[0002] Autism spectrum disorder (ASD) is a pervasive developmental disorder that causes severe and pervasive impairment in thinking, feeling, language, and the ability to relate to others. The onset is generally before the age of 3 years, and is usually first diagnosed in early childhood. The disorder can range from a severe form, called autistic disorder, through pervasive development disorder not otherwise specified (PDD-NOS), to a much milder form, Asperger syndrome. They also include two rare disorders, Rett syndrome and childhood disintegrative disorder. The disorder has a prevalence of 0.6% in the population, affecting many more boys than girls.

[0003] Currently there is no single best treatment package for all children with ASD nor is there a simple diagnosis method for the disorder. One point that expert professionals agree on is that early intervention is important; another is that most individuals with ASD respond well to highly structured, specialized programs. As soon as a child's disability has been identified, it is recommended that instructions should begin. Effective programs will teach early communication and social interaction skills. In children younger than 3 years, appropriate interventions usually take place in the home or a child care center. These early interventions target specific deficits in learning, language, imitation, attention, motivation, compliance, and initiative of interaction. Included are behavioral methods, communication, occupational and physical therapy along with social play interventions.

[0004] Although early intervention has been shown to have a dramatic impact on reducing symptoms and increasing a child's ability to grow and learn new skills, it is estimated that only 50 percent of children are diagnosed before kindergarten. Currently there is no method of early diagnosis and/or predictive method for autism. Parents are usually the first to notice unusual behaviors in their child. In some cases, the baby seemed “different” from birth, unresponsive to people or focusing intently on one item for long periods of time. The first signs of an autism spectrum disorder can also appear in children who had been developing normally. When an affectionate, babbling toddler suddenly becomes silent, withdrawn, self-abusive, or indifferent to social overtures, something is wrong.

[0005] Twin and family studies have estimated the heritability of autism as being up to 90%, making it one of the most heritable complex disorders. Rare genetic syndromes and known chromosomal anomalies explain roughly 10% of cases of autism, including Fragile X, tuberous sclerosis, Smith-Lemli-Opitz syndrome, and maternally-inherited duplications of the Prader-Willi/Angelman syndrome region (15q11-13). However, despite high heritability, genetic studies to date have not provided substantial insight into the 90% of autism with idiopathic etiology.

[0006] Therefore, there is a need for an early diagnosis method and also methods of predicting a fetus, an infant's or individual's likelihood of the developing autism.

### SUMMARY OF THE INVENTION

[0007] Embodiments of the invention are based on the discovery that there are certain genomic imbalances that are associated with autism spectrum disorder (ASD). The inventors have identified regions of rare copy-number variation in families with autism and observed an association between a microdeletion on chromosome 16 (and the inherited reciprocal duplication) (on locus 16p11.2) and autism. Both the deletion (˜546-593 kb, in the 29.5 Mb -31.1 Mb region) and the duplication are likely to be mediated by the 147-kb segmental duplication flanking the deleted sequence. In addition, microdeletions and/or microduplications were observed on chromosome 15 (locus 15q13.2q13.3, BP4-BP5) that are associated with families with autism. The microdeletions and/or microduplications ranged from 0.5 Mb to 2.0 Mb in size.

[0008] Accordingly, in one embodiment, provided herein is a method for diagnosing autism in an individual, the method comprising the steps of: (a) detecting a microdeletion on chromosome 16p11.2; and (b) detecting a microduplication on chromosome 16p11.2; wherein the presence of about a 500 kb microdeletion that is flanked by a ˜100 kb microduplication on chromosome 16p11.2 in the genome of the individual indicates that the individual is likely to be autistic. In one embodiment, the microdeletion and microduplication on chromosome 16p11.2 occurs between 29.5 Mb-31.1 Mb region.

[0009] In some embodiments, the microdeletion on chromosome 16p11.2 is between 500-600 kb. In one embodiment, the microdeletion on chromosome 16p11.2 is 546 kb. In another embodiment, the microdeletion on chromosome 16p11.2 is 593 kb. In some embodiments, the microdeletion on chromosome 16p11.2 involve the deletion of these genes: SPN, MAZ, TAO K2 and TBX6.

[0010] In one embodiment, the microduplication that flanks the 500 kb microdeletion on chromosome 16p11.2 is 147 kb.

[0011] In another embodiment, provided herein is a method for diagnosing autism in an individual, the method comprising detecting a microduplication on chromosome 15q13.2q13.3 wherein the presence of about a 0.500 Mb or more microduplication on chromosome 15q3.2q13.3 in the genome of the individual indicates that the individual is likely to be autistic. In one embodiment, the microduplication on chromosome 15q13.2q13.3 occurs between BP4-BP5 region. In one embodiment, the microduplication is between 0.500 Mb to 2 Mb long.

[0012] In one embodiment, provided herein is a method for diagnosing autism in an individual, the method comprising detecting a microdeletion on chromosome 15q13.2q13.3 wherein the presence of about a 0.500 Mb or more microdeletion on chromosome 15q13.2q13.3 in the genome of the individual indicates that the individual is likely to be autistic. In one embodiment, the microdeletion on chromosome 15q13.2q13.3 occurs between BP4-BP5 region. In one embodiment, the microdeletion is between 0.500 Mb to 2 Mb long.

[0013] In some embodiments, the microdeletion or microduplication on chromosome 15q13.2q13.3, BP4-BP5 involve the deletion or duplication of these genes: MTMR15, MTMR10, TRPM1, KLF13, OTUD7A and CHRNA7.

[0014] In one embodiment, the detection is by oligonucleotide-based array comparative genomic hybridization (oligonucleotide-based CGH). The oligonucleotide-based array should have oligonucleotides covering these genes: SPN, MAZ, TAOK2, TBX6, MTMR15, MTMR10, TRPM1, KLF13, OTUD7A and CHRNA7.

[0015] In one embodiment, the detection is by bacterial artificial chromosome-based array comparative genomic hybridization (BAC-based CGH).

[0016] In one embodiment, the detection is by fluorescence in situ hybridization (FISH).

[0017] In one embodiment, the detection is by multiplex ligation-dependent probe amplification (MLPA). MLPA probes designed for these genes: SPN, MAZ, TAOK2, TBX6, MTMR15, MTMR10, TRPM1, KLF13, OTUD7A and CHRNA7 are be used.

### BRIEF DESCRIPTION OF THE DRAWINGS

[0018] FIG. 1 shows the chromosome view of array CGH results showing a terminal deletion on 2q37.3. Arrow points to the targets with a downward-shifted log₂ ratio.

[0019] FIG. 2 summaries the oligonucleotide-array CGH detection of a heterozygous genomic deletion of 3 consecutive probes covering a minimal 23-kb interval.

[0020] FIG. 2A shows the deletion of 3 consecutive targets (underlined with rectangular bar) was confirmed by dye-swap array CGH. Note the symmetrical opposite ratios between forward-labeled (downward-shift) and reverse-labeled (upward-shift) array CGH.

[0021] FIG. 2B shows that the 244K whole-genome oligonucleotide-array CGH confirmation of the deletion. The rectangular bar underlines the deleted region. Note the entire CARKL gene deletion and the partial CTNS gene deletion (forward labeling only).

[0022] FIG. 2C shows that the MLPA confirmation of the deletion. The trace in lighter gray is a sample from a healthy control individual; the trace in darker gray is the patient sample. The dosage of CTNS exons 2 and 6 appears reduced by half (underlined with the rectangular bar), whereas the dosage of CTNS exon 12 is unchanged.

[0023] FIG. 2D shows that the a segment of the sequencing trace around the deletion junction of the common European deletion. One base (C) overlaps.

[0024] FIG. 3 summaries the regions of microdeletion and microduplication on Chromosome 16p11.2.

[0025] FIG. 3A shows normalized intensity data are averaged every 11 to 12 probes across a 2-Mb region on chromosome 16. Means (closed circles) and standard deviations (vertical bars) for subjects with normal copy numbers; subjects with duplication are denoted with open circles, and those with deletions are denoted with triangles. Annotated genes in the region of interest are shown (not to scale), with gray denoting brain expression and black denoting unknown or little brain expression. Arrows represent the segmental duplications mediating the rearrangements, with three genes located within the segmental duplication.

[0026] FIG. 3B shows both the deletion and duplication graphs showing shifted overlaying of two traces of multiplex ligation-dependent probe amplification (MLPA). Black tracings in both graphs represent a normal control sample. In the deletion graph, grey tracings show a sample with a 16p11.2 deletion; in the duplication graph, grey tracings show a sample with a 16p11.2 duplication. The MLPA profiles were generated by ABI 3730 Genetic Analyzer and normalized by GENEMAKER software (SoftGenetics). The four amplicons that are underlined with a black bar and shown with arrows are from probes located within the imbalanced 16p11.2 region. Amplicons labeled with C are control probes located either on chromosome 16 but outside the imbalanced region or on other chromosomes.

[0027] FIG. 3C shows the oligo array CGH data from one clinical sample with the same chromosome 16p1 1.2 deletion and parents screened by 244K whole genome array CGH platform at Children's Hospital Boston. On this scale, zero indicates that reference and test sample have equal copy number, below zero indicates that the Cy5 labeled sample has decreased copy number, and above zero indicates that the Cy5 labeled sample has increased copy number.

[0028] FIG. 4 (top panel) shows an ideogram of proximal chromosome 15q (15q11q14) shows the PWS/AS region and the more distal 15q13.2q13.3 region between BP4 and BP5.

[0029] FIG. 4 (lower panel) shows scatter plots of array CGH data for a deletion of ˜1.5 Mb superimposed with dye-swap scatter plot (note the mirrored distribution of spots). The lower scatter plot represents a duplication of ˜500 Kb within the BP4-BP5 interval. The relative positions of 7 genes (6 reference genes and one miRNA gene) are shown in the bottom panel (grey bars). The 1.5 Mb deletions (chr15:28.719-30.232 Mb; hg18) include all 7 genes, while the 500 kb duplications (chrl5:28.902-29.404 Mb; hgl8) contain 4 genes (MTMR15, MTMR10, TRPM1 and hsa-mir-211) within the BP4-BP5 at chromosome 15q13.2q13.3.

[0030] FIG. 5 summarizes the 15q13.2q13.3 del/dup MLPA, shows results of MLPA for patient 1 with deletion. Top panel is overlapping MLPA traces for case (lighter traces) and control (darker traces) samples. Bottom panel is a histogram of normalized peak height for probes located within the imbalanced 15q13.2q13.3 region (arrows), probes on chromosome 15 outside the imbalance interval (unlabelled black bars), and control probes located on other chromosomes (C).

[0031] FIG. 6. Brief outline of multiplex ligation-dependent probe amplification (MLPA) assay.

### BRIEF LISTING OF THE TABLES

[0032] Table 1. Genomic imbalance identified in clinical samples by oligonucleotide-array CGH and confirmed with alternative methods.

[0033] Table 2.Genomic Coverage with Oligo Array CGH (CHB Version 1.0).

[0034] Table 3. Genomic imbalance (GI) detected in validation samples and comparison between oligonucleotide array results and alternate methods of detection

[0035] Table 4. Detection of 16p11.2 copy-number variants according to sample.

[0036] Table 5. Duplication of chromosome 15q11-13 in AGRE sample.

[0037] Table 6. Phenotypic Data in AGRE families and Iceland probands with copy number variants at 16p1 1.2. Family structure and ADI-R and ADOS subscores, as well as performance measures are given for AGRE families and Iceland probands with copy number variants at 16p1 1.2.

[0038] Table 7. Previously reported CNVs in autism. Events featured in the main tables or text of recent studies evaluating copy number in autism. For each reported event, we include events observed in our data with substantial overlap, and for inherited events, the number transmitted: not transmitted for affected offspring with data. Our sample has some overlap with previously reported samples, * indicates a reported event in an overlapping sample which we also detect. **, event not featured in the main text or tables of the paper, but listed in the supplementary table in an overlapping sample.

[0039] Table 8. Clinical information for Children's Hospital deletion cases (Pt#) and Iceland deletion cases (Aut#). Clinical descriptive information is given for the 5 subjects in the Children's Hospital Boston sample with deletions at 16p1 1.2, and the two subjects in the Iceland sample with deletions at 16p1 1.2 and clinical data available. The third Iceland subject has a history of seizures, but no other information available.

[0040] Table 9. Clinical information for Children's Hospital duplication cases. Clinical descriptive information is given for the 4 subjects in the Children's Hospital Boston sample with duplication at 16p1 1.2.

[0041] Table 10. Iceland phenotype information. Clinical diagnosis by ICD-10 category and transmission information is listed for the Icelandic autism samples with deletions at 16p11.2.

[0042] Table 11. Chromosome 15q13.2q13.3 BP4-BP5 microduplications and microdeletions in individuals with autism.

[0043] Table 12. Multiplex ligation-dependent probe amplification (MLPA) probes for identifying microduplications and microdeletions at chromosome 15q13.2q13.3 BP4-BP5 and 16p11.2 loci.

### DETAILED DESCRIPTION OF THE INVENTION

[0044] Embodiments of the invention is based on the discovery of several genomic imbalances on chromosomes 15 and 16 of subjects that have been diagnosed with autism spectrum disorder. The genomic imbalances are deletions and duplications on chromosomes 15 and 16 of such subjects.

[0045] The inventors found a recurrent microdeletion at chromosome 16, more precisely at 16p11.2, in at least five individuals diagnosed with autism. The microdeletion involves about 593 kilo-bases (kb) deletion between the 29.5 Mb-31.1 Mb regions which is also flanked on both side with a duplication of 147 kp. The recurrent 16p11.2 microdeletion is also confirmed in five clinical samples of children with autism spectrum disorder.

[0046] The proximal portion of chromosome 15q is a well known region of genomic instability that contains many segmental duplications. Recurrent large genomic duplications were also found in the Prader-Willi/Angelman (15q11-q13) region. Deletions at 15q11-q13 that result in Prader-Willi syndrome and Angelman syndrome (PWS/AS) are typically ˜4 Mb, and are mediated by repetitive elements with clustered breakpoints (BP) at either of two proximal sites (BP1 and BP2) and one distal site (BP3).

[0047] Here, the inventors found a recurrent genomic segmental microduplications and/or microdeletions specifically at breakpoints BP4-BP5 of chromosome 15q13.2q13.3 in individuals diagnosed with autism.

[0048] The inventors analyzed DNA samples from 1,445 unrelated patients submitted consecutively for clinical array comparative genomic hybridization (CGH) testing at Children's Hospital Boston and DNA samples from 1,441 individuals with autism from 751 families in the Autism Genetic Resource Exchange (AGRE) repository. The microduplications and/or microdeletions at 15q13.2q13.3, BP4-BP5 and 16p11.2 were initially noted in single nucleotide polymorphism (SNP) genotyping which covered regions of known common copy number polymorphism and were then later confirmed by oligonucleotide-based array CGH, and by FISH and multiplex ligation-dependent probe amplification (MLPA) using probes to specific genes found in the microduplications and microdeletions regions.

[0049] Autism Spectrum Disorders (ASD), also known as Pervasive Developmental Disorders (PDDs), cause severe and pervasive impairment in thinking, feeling, language, and the ability to relate to others. These disorders are usually first diagnosed in early childhood and range from a severe form, called autistic disorder, through pervasive development disorder not otherwise specified (PDD-NOS), to a much milder form, Asperger syndrome. They also include two rare disorders, Rett syndrome and childhood disintegrative disorder.

[0050] Prevalence studies have been done in several states and also in the United Kingdom, Europe, and Asia A recent study of a U.S. metropolitan area estimated that 3.4 of every 1,000 children 3-10 years old had autism. This wide range of prevalence points to a need for earlier and more accurate screening for the symptoms of ASD. The earlier the disorder is diagnosed, the sooner the child can be helped through treatment interventions. Pediatricians, family physicians, daycare providers, teachers, and parents may initially dismiss signs of ASD, optimistically thinking the child is just a little slow and will “catch up.” Although early intervention has a dramatic impact on reducing symptoms and increasing a child's ability to grow and learn new skills, it is estimated that only 50 percent of children are diagnosed before kindergarten.

[0051] All children with ASD demonstrate deficits in 1) social interaction, 2) verbal and nonverbal communication, and 3) repetitive behaviors or interests. In addition, they will often have unusual responses to sensory experiences, such as certain sounds or the way objects look. Each of these symptoms runs the gamut from mild to severe. They will present in each individual child differently. For instance, a child may have little trouble learning to read but exhibit extremely poor social interaction. Each child will display communication, social, and behavioral patterns that are individual but fit into the overall diagnosis of ASD.

[0052] Children with ASD do not follow the typical patterns of child development. In some children, hints of future problems may be apparent from birth. In most cases, the problems in communication and social skills become more noticeable as the child lags further behind other children the same age. Some other children start off well enough. Often times between 12 and 36 months old, the differences in the way they react to people and other unusual behaviors become apparent. Some parents report the change as being sudden, and that their children start to reject people, act strangely, and lose language and social skills they had previously acquired. In other cases, there is a plateau, or leveling, of progress so that the difference between the child with autism and other children the same age becomes more noticeable.

[0053] ASD is defined by a certain set of behaviors that can range from the very mild to the severe.

[0054] ASD has been associated with mental retardation (MR). It is said that between 75% and 90% of all autistics are mentally retarded. However, having autism does not necessarily mean that one will have MR. Autism occurs at all IQ levels, from genius levels to the severely learning-disabled.

[0055] Furthermore, there is a distinction between autism and MR. People with MR generally show even skill development, whereas individuals with autism typically show uneven skill development. Individuals with autism may be very good at certain skills, such as music or mathematical calculation, yet perform poorly in other areas, especially social communication and social interaction. It is important to distinguish autism from mental retardation or other disorders since diagnostic confusion may result in referral to inappropriate and ineffective treatment techniques. It is more accurate to class autism as a developmental disability, and not a mental illness.

[0056] Currently, there is no single test for ASD. In evaluating a child, clinicians rely on behavioral characteristics to make a diagnosis. Some of the characteristic behaviors of ASD can be apparent in the first few months of a child's life, or they can appear at any time during the early years. For the diagnosis, problems in at least one of the areas of communication, socialization, or restricted behavior must be present before the age of 3. The diagnosis requires a two-stage process. The first stage involves developmental screening during “well child” check-ups; the second stage entails a comprehensive evaluation by a multidisciplinary team.

[0057] In one embodiment, diagnosis is by the Autism Diagnostic Interview-Revised (ADI-R) (Lord C, et al., 1993, Infant Mental Health, 14:234-52). In another embodiment, diagnosis is by symptoms fitting an AGRE classification of autism, broad spectrum (patterns of impairment along the spectrum of pervasive developmental disorders, including PDD-NOS and Asperger's syndrome).

[0058] Recent studies strongly suggest that some people have a genetic predisposition to autism. In families with one autistic child, the risk of having a second child with the disorder is approximately 5 percent, or one in 20. This is greater than the risk for the general population.

[0059] The present discoveries is useful for making a diagnosis as well as a prediction of the probability of developing ASD.

[0060] Accordingly, provided herein is a method for diagnosis of autism and autism spectrum disorders using genetic analysis to identify the presence of a 593 kb deletion in chromosome 16p11.2 between 29.5 Mb-31.1 Mb region and the presence of a duplicate sequence 147 kb flanking the 593 kb deletion region.

[0061] In addition, provided herein is a method for diagnosis of autism and autism spectrum disorders using genetic analysis to identify the presence of microdeletion or microduplication on chromosome 15q13.2q13.3, wherein the microdeletion or microduplication can vary in sizes from 0.500 Mb to 2.0 Mb long.

[0062] In one embodiment, provided herein is a method for diagnosing autism in an individual, the method comprising the steps of: (a) detecting a microdeletion on chromosome 16p11.2; and (b) detecting a microduplication on chromosome 16p11.2; wherein the presence of a ˜500 kb microdeletion that is flanked by a ˜100 kb microduplication on chromosome 16p11.2 in the genome of the individual indicates that the individual is likely to be autistic.

[0063] In one embodiment, the individual is a human. In one embodiment, the individual is a human fetus of at least 20 weeks of gestation. In one embodiment, the individual is a human fetus between 20 weeks of gestation to full term, approximately 38 weeks of gestation.

[0064] Since autism does not necessary occur immediately from birth and can develop later in the life of a child, being able to predict the likelihood that a child can develop the disorder allows the parents and clinician to be more vigilant and be psychologically and medically prepared when the symptoms manifest. Twin studies suggest that autism has a strong genetic component. Parents with one or more autistic children and plan to have additional children can use the methods described herein to screen for the likelihood that the new additional child is predisposed to develop the disorder. Accordingly, in one embodiment, provided herein is a method for predicting the likelihood of autism developing in an individual, the method comprising the steps of: (a) detecting a microdeletion on chromosome 16p11.2; and (b) detecting a microduplication on chromosome 16p11.2;wherein the presence of a ˜500 kb microdeletion that is flanked by a ˜100 kb microduplication on chromosome 16p11.2 in the genome of the individual indicates that the individual is likely to be autistic.

[0065] In one embodiment, the microdeletion and microduplication on chromosome 16p11.2 associated with autism occurs between the 29.5 Mb-30.1 Mb region.

[0066] In one embodiment, the microdeletion and microduplication on chromosome 16p11.2 associated with autism occurs between the 29.5 Mb-31.1 Mb region.

[0067] In one embodiment, the microdeletion at 16p11.2, 29.5 Mb-31.1 Mb region is about 500 kb long. In one embodiment, the microdeletion at 16p11.2, 29.5 Mb-31.11 Mb region is 500 kb long. In another embodiment, the microdeletion is 593 kb long. In another embodiment, the microdeletion is 546 kb long. In some embodiments, the microdeletion is between about 500 to about 600 kb long, including all the whole integers between 500 and 600. In some embodiments, the microdeletion is between 500 to 600 kb long, including all the whole integers between 500 and 600.

[0068] As used herein, the term “about” refers to a range of 1% to 3% more or less of the length of a sequence described herein. For example, about 500 kb long refers to a range of 1% to 3% more of 500 kb, or 1% to 3% less of 500 kb. All ranges between 1% and 3% including decimals of 1% and 3% are included herein, for example, 1%, 2%, 3%, 1.3%, 1.7%, 2.2%, 2.7% etc.

[0069] In one embodiment, the microduplication at 16p11.2, 29.5 Mb-3 1.1 Mb region flanking the microdeletion is about 100 kb long. In one embodiment, the microduplication at 16p1 1.2, 29.5 Mb-31.1 Mb region flanking the microdeletion is 100 kb long. In another embodiment, the microduplication is 147 kb long. In some embodiments, the microduplication is between about 100 to about 147 kb long, including all the whole integers between 100 and 147. In another embodiment, the microduplication is 147 kb long. In some embodiments, the microduplication is between 100 to 147 kb long, including all the whole integers between 100 and 147.

[0070] In one embodiment, the microdeletion at 16p11.2, 29.5 Mb-3 1.1 Mb region encompass the genes: SPN, MAZ, TAOK2 and TBX6. A skilled artisan in the art will be able to design oligonucleotide probes for use in the various detection methods known in the art, e.g. FISH, MLPA, oligonucleotide-based array CGH, to detect the deletion of these genes in the genomic DNA (nucleic acid sample) of the individual tested.

[0071] SPN is sialophorin (Genbank Accession no. NC_{—}000016.8, GI:51511732; Region: 29581801-29589329; GenomeProject:168; Ensembl:ENSG0000197471) (SEQ. ID. No. 43). Sialophorin (leukosialin) is a major sialoglycoprotein on the surface of human T lymphocytes, monocytes, granulocytes, and some B lymphocytes, which appears to be important for immune function and may be part of a physiologic ligand-receptor complex involved in T-cell activation. This gene can be found on Chromosome 16 at location 29,581,801-29,589,312. The start of this gene is located in Contig AC009086.6.1.201155.

[0072] MAZ is MYC-associated zinc finger protein (purine-binding transcription factor). Synonyms: Pur-1, ZF87, Zif87, ZNF801. (Genbank Accession no. NC_{—}000016.8 GI:51511732; Region: 29725356-29730005; GenomeProject:168; Ensembl:ENSG00000103495) (SEQ. ID. No. 44). This gene can be found on Chromosome 16 at location 29,725,356-29,730,003. The start of this gene is located in Contig AC009133.7.1.174363.

[0073] TAO K2 is TAO kinase 2 which is also known as PSK; PSK 1; TAO 1; TAO2; MAP3K17; KIAA0881 (Serine/threonine-protein kinase TAO2 (EC 2.7.11.1) (Thousand and one amino acid protein 2) (Prostate-derived STE20-like kinase 1) (PSK-1) (Kinase from chicken homolog C) (hKFC-C)). (Genbank Accession no. NC_{—}000016.8 GI:51511732; Region: 29892723-29911082; GenomeProject:168; Ensembl:ENSGO0000149930) (SEQ. ID. No. 45). This gene can be found on Chromosome 16 at location 29,892,723-33,861,588. The start of this gene is located in Contig AC093512.2.1.157481.

[0074] TBX6, T-box transcription factor (T-box protein 6) is a member of a phylogenetically conserved family of genes that share a common DNA-binding domain, the T-box. T-box genes encode transcription factors involved in the regulation of developmental processes. Knockout studies in mice indicate that this gene is important for specification of paraxial nuesoderm structures. It is also known as T-box 6 or DFNB67. (Genbank Accession no. NC_{—}000016.8 GI:51511732; Region: complement(30004583-30010709);GenomeProject:168; Ensembl:ENSG00000149922) (SEQ. ID. No. 46). This gene can be found on Chromosome 16 at location 30,004,583-30,010,709. The start of this gene is located in Contig AC012645.7.1.192943.

[0075] In one embodiment, the method for diagnosing and/or predicting autism comprises detecting the presence of a deletion in region 29581801-29589329 on chromosome 16. (Genbank Accession no. NC_{—}000016.8, GI:51511732; Region: 29581801-29589329; GenomeProject: 168; Ensembl:ENSG00000 197471).

[0076] In one embodiment, the method for diagnosing and/or predicting autism comprises detecting the presence of a deletion in region 29725356-29730005 on chromosome 16. (Genbank Accession no. NC_{—}000016.8 GI:51511732; Region: 29725356-29730005; GenomeProject: 168; Ensembl:ENSG00000103495).

[0077] In one embodiment, the method for diagnosing and/or predicting autism comprises detecting the presence of a deletion in region 29892723-29911082 on chromosome 16. (Genbank Accession no. NC_{—}000016.8 GI:51511732; Region: 29892723-29911082; GenomeProject: 168; Ensembl:ENSG00000149930).

[0078] In one embodiment, the method for diagnosing and/or predicting autism comprises detecting the presence of a deletion in region 30004583-30010709 on chromosome 16. (Genbank Accession no. NC_{—}000016.8 GI:51511732; Region: complement (30004583-30010709); GenomeProject: 168; Ensembl:ENSG00000149922).

[0079] In one embodiment, the method for diagnosing and/or predicting autism comprises detecting the presence of a deletion in region 29,581,801-30,010,709 on chromosome 16.

[0080] In one embodiment, the method for diagnosing and/or predicting autism comprises detecting the deletion of all four genes: SPN, MAZ, TAO K2 and TBX6. In one embodiment, the method for diagnosing and/or predicting autism comprises detecting the deletion of at least one of the four genes: SPN, MAZ, TAO K2 and TBX6. In one embodiment, the deletion of any of the four genes is complete, wherein all the 3′UTR, 5′UTR, introns and exons in the genomic sequence are deleted. In one embodiment, the deletion of any of the four genes is partial, wherein a portion of the genomic sequence comprising the 3′UTR, 5′UTR, introns and exons is deleted.

[0081] In one embodiment, the probes used in detecting the deletion in region 29581801-30010709 on chromosome 16 comprises sequences from SEQ. ID. Nos. 43-46.

[0082] In one embodiment, provided herein is a method for diagnosing autism in an individual, the method comprising detecting a microduplication on chromosome 15q13.2q13.3 wherein the presence of a ˜0.500 Mb or more microduplication on chromosome 15q13.2q13.3 in the genome of the individual indicates that the individual is likely to be autistic.

[0083] In one embodiment, the microduplication on chromosome 15q13.2q13.3 occurs between BP4-BP5 region. BP4-BP5 covers ˜1.5 Mb (chrl5:28.719-30.298 Mb) and includes six protein-coding genes and one miRNA gene, while the smaller duplications cover ˜0.500 Mb (chr15:28.902-29.404 Mb) and contain three reference genes and one miRNA gene. The BP4-BP5 deletion and duplication events span CHRNA7, a candidate gene for seizures. The six reference genes are MTMR15, MTMR10, TRPM1, KLF13, OTUD7A and CHRNA7, and a miRNA gene (hsa-mir-211).

[0084] In one embodiment, the microduplication on chromosome 15q13.2q13.3, BP4-BP5 region is any where between about 0.500 Mb to about 2 Mb long. In one embodiment, the microduplication on chromosome 15q13.2q13.3, BP4-BP5 region is any where between 0.500 Mb to 2 Mb long.

[0085] In one embodiment, provided herein is a method for predicting the likelihood of autism developing in an individual, the method comprising detecting a microduplication on chromosome 15q13.2q13.3 wherein the presence of a ˜0.500 Mb or more microduplication on chromosome 15q13.2q13.3 in the genome of the individual indicates that the individual is likely to be autistic.

[0086] In one embodiment, the microduplication at 15q13.2q13.3 BP4-BP5 region encompass the genes: MTMR15, MTMR10, TRPM1, KLF13, OTUD7A, CHRNA7 and miRNA gene (hsa-mir-211). A skilled artisan in the art will be able to design oligonucleotide probes for use in the various detection methods known in the art, e.g. FISH, MLPA, oligonucleotide-based array CGH, to detect the deletion of these genes in the genomic DNA (nucleic acid sample) of the individual tested.

[0087] MTMR15 is myotubularin related protein 15. It is also known as DKFZp451H236, DKFZp686K16147, KIAA1018. (Genbank Accession No. NC_{—}000015.8 GI:51511731; Region: 28,983,421-29022600; GenomeProject: 168; Ensembl:ENSG00000198690) (SEQ. ID. No. 47). This gene can be found on Chromosome 15 at location 28,983,399-29,022,600. The start of this gene is located in Contig AC087481.9.1.179400.

[0088] MTMR10 is myotubularin related protein 10. It is also known as FLJ20313. (Genbank Accession no. NC_{—}000015.8 GI:51511731; Region: complement (29,018,436-29,071,099); GenomeProject:168; Ensembl:ENSG00000166912) (SEQ. ID. No. 48). This gene can be found on Chromosome 15 at location 29,020,705-29,071,099. The start of this gene is located in Contig AC090829.3.1.102926.

[0089] TRPM 1 is transient receptor potential cation channel, subfamily M, member 1. It is also known as MLSN1 and LTRPC1. (Genbank Accession no. NC_{—}000015.8 GI:51511731; Region: complement (29,080,829-29,181,216); GenomeProject: 168; Ensembl:ENSG00000134160) (SEQ. ID. No. 49). The protein encoded by this gene is similar to the transient receptor potential (Trp) calcium channel family members. The expression of this protein is inversely correlated with melanoma aggressiveness, suggesting that it suppresses melanoma metastasis. This gene can be found on Chromosome 15 at location 29,080,845-29,181,216. The start of this gene is located in Contig AC009562.9.1.221475.

[0090] KLF13 is Kruppel-like factor 13. It is also known as BTEB3, FKLF2, NSLP1, RFLAT-1, RFLAT1, RANTES factor of late activated T lymphocytes-1; Spi like zinc finger transcription factor; basic transcription element binding protein 3; transcription factor NSLP1. (Genbank Accession No. NC_{—}000015.8 GI:51511731; Region: 29,406,375-29,457,394; GenomeProject:168; Ensembl:ENSG00000169926) (SEQ. ID. No. 50). KLF13 belongs to a family of transcription factors that contain 3 classical zinc finger DNA-binding domains consisting of a zinc atom tetrahedrally coordinated by 2 cysteines and 2 histidines (C2H2 motif). These transcription factors bind to GC-rich sequences and related GT and CACCC boxes. This gene can be found on Chromosome 15 at location 29,406,375-29,457,393. The start of this gene is located in Contig AC012236.12.1.173729.

[0091] OTUD7A is OTU domain containing 7A. It is also known as OTUD7; C15orf16; C16ORF15; CEZANNE2. (Genbank Accession No. NC_{—}000015.8 GI:51511731; Region: complement (29,562,621-29,734,834); GenomeProject: 168; Ensembl:ENSG0000169918) (SEQ. ID. No. 51). Deubiquitinating enzymes (DUBs; see MIM 603478) are proteases that specifically cleave ubiquitin (MIM 191339) linkages, negating the action of ubiquitin ligases. OTUD7A belongs to a DUB subfamily characterized by an ovarian tumor (OTU) domain. This gene can be found on Chromosome 15 at location 29,562,621-29,734,834. The start of this gene is located in Contig AC104266.7.1.88425.

[0092] CHRNA7 is cholinergic receptor, nicotinic, alpha 7. It is also known as NACHRA7 or CHRNA7-2. (Genbank Accession No. NC_{—}000015.8 GI:51511731; Region: 30,110,018-30,248,541; GenomeProject: 168; Ensembl:ENSG0000175344) (SEQ. ID. No. 52). The nicotinic acetylcholine receptors (nAChRs) are members of a superfamily of ligand-gated ion channels that mediate fast signal transmission at synapses. The nAChRs are thought to be hetero-pentamers composed of homologous subunits. The proposed structure for each subunit is a conserved N-terminal extracellular domain followed by three conserved transmembrane domains, a variable cytoplasmic loop, a fourth conserved transmembrane domain, and a short C-terminal extracellular region. The protein encoded by this gene forms a homo-oligomeric channel, displays marked permeability to calcium ions and is a major component of brain nicotinic receptors that are blocked by, and highly sensitive to, alpha-bungarotoxin. This gene can be found on Chromosome 15 at location 30,110,018-30,249,002. The start of this gene is located in Contig AC079969.5.1.227506.

[0093] hsa-mir-211 is a micro RNA (miRNA) gene (miRBase Accession No. M10000287; Genbank Accession no. NC_{—}000016.8 GI:51511732; 29,142,527-29,146,636; GenomeProject:168) (SEQ. ID. No. 53). Chromosome 15, Region: 29,142,527-29,146,636; Ensembl Homo sapien version 50.361; NCBI 36.

[0094] In one embodiment, the method for diagnosing and/or predicting autism comprises detecting the presence of a microduplication in region 28,719,136-30,701,432 on chromosome 15.

[0095] In one embodiment, the method for diagnosing and/or predicting autism comprises detecting the presence of a microduplication in region 28,719,136-30,648,918 on chromosome 15.

[0096] In one embodiment, the method for diagnosing and/or predicting autism comprises detecting the presence of a microduplication in region 28,902,339-29,404,603 on chromosome 15.

[0097] In one embodiment, the method for diagnosing and/or predicting autism comprises detecting the presence of a microduplication in region 28,983,399-29,022,600 on chromosome 15.

[0098] In one embodiment, the method for diagnosing and/or predicting autism comprises detecting the presence of a microduplication in region 29,018,436-29,071,099 on chromosome 15.

[0099] In one embodiment, the method for diagnosing and/or predicting autism comprises detecting the presence of a microduplication in region 29,080,829-29,181,216 on chromosome 15.

[0100] In one embodiment, the method for diagnosing and/or predicting autism comprises detecting the presence of a microduplication in region 29,406,375-29,457,394 on chromosome 15.

[0101] In one embodiment, the method for diagnosing and/or predicting autism comprises detecting the presence of a microduplication in region 29,562,621-29,734,834 on chromosome 15.

[0102] In one embodiment, the method for diagnosing and/or predicting autism comprises detecting the presence of a microduplication in region 30,110,018-30,248,541 on chromosome 15.

[0103] In one embodiment, the method for diagnosing and/or predicting autism comprises detecting the presence of a microduplication in region 29,142,527-29,146,636 on chromosome 15.

[0104] In one embodiment, the method for diagnosing and/or predicting autism comprises detecting the microduplication of all seven genes: MTMR15, MTMR10, TRPM1, KLF13, OTUD7A, CHRNA7 and miRNA gene (hsa-mir-211). In one embodiment, the method for diagnosing and/or predicting autism comprises detecting the microduplication of at least one of the seven genes: MTMR15, MTMR10, TRPM1, KLF13, OTUD7A, CHRNA7 and miRNA gene (hsa-mir-211). In one embodiment, the microduplication of any of the seven genes is complete, wherein all the 3′UTR, 5′UTR, introns and exons in the genomic sequence are duplicated. In one embodiment, the microduplication of any of the seven genes is partial, wherein a portion of the genomic sequence comprising the 3′UTR, 5′UTR, introns and exons is duplicated.

[0105] In one embodiment, the probes used in detecting the microduplication in region 28,719,136-30,701,432 on chromosome 15 comprises sequences from SEQ. ID. Nos. 47-53.

[0106] In another embodiment, provided herein method for diagnosing autism in an individual, the method comprising detecting a microdeletion on chromosome 15q13.2q13.3 wherein the presence of a ˜0.500 Mb or more microdeletion on chromosome 15q13.2q13.3 in the genome of the individual indicates that the individual is likely to be autistic.

[0107] In one embodiment, the microdeletion on chromosome 15q13.2q1 3.3 occurs between BP4-BP5 region.

[0108] In one embodiment, the microdeletion on chromosome 15q13.2q13.3, BP4-BP5 region is between about 0.500 Mb to about 2 Mb long. In one embodiment, the microdeletion on chromosome 15q13.2q13.3, BP4-BP5 region is between 0.500 Mb to 2 Mb long.

[0109] In one embodiment, provided herein is a method for predicting the likelihood of autism developing in an individual, the method comprising detecting a microdeletion on chromosome 15q13.2q13.3 wherein the presence of a ˜0.500 Mb or more microdeletion on chromosome 15q13.2q13.3 in the genome of the individual indicates that the individual is likely to be autistic.

[0110] In one embodiment, the microdeletion at 15q13.2q13.3 BP4-BP5 region encompass the genes: MTMR15, MTMR10, TRPM1, KLF13, OTUD7A CHRNA7 and miRNA gene (hsa-mir-211). A skilled artisan in the art will be able to design oligonucleotide probes for use in the various detection methods known in the art, e.g. FISH, MLPA, oligonucleotide-based array CGH, to detect the deletion of these genes in the genomic DNA (nucleic acid sample) of the individual tested.

[0111] In one embodiment, the method for diagnosing and/or predicting autism comprises detecting the presence of a microdeletion in region 28,709,202-30,401,675 on chromosome 15.

[0112] In one embodiment, the method for diagnosing and/or predicting autism comprises detecting the microdeletion of all seven genes: MTMR15, MTMR10, TRPM1, KLF13, OTUD7A, CHRNA7 and miRNA gene (hsa-mir-211). In one embodiment, the method for diagnosing and/or predicting autism comprises detecting the microdeletion of at least one of the seven genes: MTMR15, MTMR10, TRPM1, KLF13, OTUD7A. CHRNA7 and miRNA gene (hsa-mir-211). In one embodiment, the microdeletion of any of the seven genes is complete, wherein all the 3′UTR, 5′UTR, introns and exons in the genomic sequence are deleted. In one embodiment, the microdeletion of any of the seven genes is partial, wherein a portion of the genomic sequence comprising the 3′UTR 5′UTR, introns and exons is deleted.

[0113] In one embodiment, the probes used in detecting the microdeletion in region 28,709,202-30,401,675 on chromosome 15 comprises sequences from SEQ. ID. Nos. 47-53.

[0114] In some embodiments, the methods described herein are conducted using nucleic acid samples isolated from the individuals. The individuals are humans, adults, children, or fetus. The nucleic acid samples can be isolated from cells obtained from the individuals. For example, fetal cells obtained in routine amniocentesis after 20 weeks of gestation; cells from a newly born infant can be obtained from the umbilical cord blood, placena, or a blood sample; for older children and individuals, cells can be obtained from a blood sample or a cheek swab. Genomic DNA can be extracted from any biological sample containing nucleated cells, such as a peripheral blood sample or a tissue sample (e.g., mucosal scrapings of the lining of the mouth or from renal or hepatic tissue). One ordinary skilled in the art will be able to isolate nucleic acid samples from the individuals from various sources. Standard methods can be used to extract genomic DNA from a blood or tissue sample, including, for example, phenol extraction. Alternatively, genomic DNA can be extracted with kits such as the QIAAMP® Tissue Kit (QIAGEN®, Valencia, Calif.), WIZARD® Genomic DNA purification kit (Promega, Madison, Wis.) and the A.S.A.P.™ Genomic DNA isolation kit (Boehringer Mannheim, Indianapolis, Ind.).

[0115] In one embodiment, the nucleic acid samples isolated from the individual is genomic DNA. In one embodiment, genomic DNA is digested by restriction enzymes. In one embodiment, genomic DNA is labeled. Suitable labels, include, for example, radioisotopes (e.g., ¹²⁵I, ¹³¹I, ³⁵S, ³H, ³²P, ³³P, or ¹⁴C), fluorescent moieties (e.g., fluorescein, carboxyfluorescein, fluorescein-5-isothiocyanate (FITC), PerCP, rhodamine, or phycoerythrin (PE)), luminescent moieties (e.g., QDO™ nanoparticles supplied by the Quanturn Dot Corporation, Palo Alto, Calif.), or compounds that absorb light of a defined wavelength. Methods of detecting or quantifying a label depend on the nature of the label and are known in the art. Examples of detectors include, without limitation, x-ray film, radioactivity counters, scintillation counters, spectrophotometers, calorimeters, fluorometers, luminometers, and densitometers.

[0116] In some embodiments, the labeled genomic DNA is hybridized the BAC-based array chips and/or oligonucleotide-based array chips in comparative genomic hybridization (CGH) to detect the presence of the described microdeletions and/or microduplications herein.

[0117] In some embodiments, the methods described herein are conducted in individuals with no family history of autism. In some embodiments, the methods described herein are conducted in individuals with a family history of autism. For example, individuals with at least one direct sibling who is diagnosed with autism or a relative in the extended family who is diagnosed with autism.

[0118] In one embodiment, the individual does not have any problems or symptoms in social skills, language and behavior that are associated with ASD.

[0119] In another embodiment, the individual can be beginning to show problems or symptoms in social skills, language and behavior that are associated with ASD. The teacher, clinician, friends, parents and/or psychologist have noticed some problems or symptoms in social skills, language and behavior in the child and have recommended the child be evaluated for ASD. In social interactions and relationships, symptoms can include: significant problems developing nonverbal communication skills, such as eye-to-eye gazing, facial expressions, and body posture; failure to establish friendships with children the same age; lack of interest in sharing enjoyment, interests, or achievements with other people; lack of empathy. People with autism can have difficulty understanding another person's feelings, such as pain or sorrow. In verbal and nonverbal communication, symptoms can include: delay in, or lack of, learning to talk. As many as 50% of people with autism never speak; problems taking steps to start a conversation. Also, people with autism have difficulties continuing a conversation once it has begun; stereotyped and repetitive use of language. People with autism often repeat over and over a phrase they have heard previously (echolalia). Autistic individuals have difficulty understanding their listener's perspective. For example, a person with autism may not understand that someone is using humor. They may interpret the communication word for word and fail to catch the implied meaning. In limited interests in activities or play, symptoms can include: an unusual focus on pieces. Younger children with autism often focus on parts of toys, such as the wheels on a car, rather than playing with the entire toy or are preoccupation with certain topics. For example, older children and adults may be fascinated by train schedules, weather patterns, or license plates. A need for sameness and routines. For example, a child with autism may always need to eat bread before salad and insist on driving the same route every day to school. Stereotyped behaviors. These can include body rocking and hand flapping.

[0120] In yet another embodiment, the individual has been diagnosed with ASD.

[0121] In some embodiments, the microdeletion and/or microduplications described herein are be detected by any DNA, RNA (e.g., Northern blotting), or protein (e.g., Western blotting or protein activity) based method. Non-limiting examples of DNA based methods include quantitative PCR; fluorescence in situ hybridization (FISH); Southern blotting; multiple amplifiable probe hybridization (MAPF, see Hollox et al., 2002, Expert Rev. Mol. Diagn., 2(4):370-8.); multiplex ligation-dependent probe amplification (MLPA, see Schouten et al., 2002, Nucleic Acids Res., 30(12):e57, kits available from MRC-Holland, Amsterdam, The Netherlands); QMPSF (Quantitative Multiplex PCR of Short Fluorescent Fragments, see Casilli et al., 2002, Hum. Mutat. 20(3):218-26), and combinations of such methods. These methods are well known in the art and one of ordinary skill in the art can perform the analyses using the genomic DNA isolated from the individual.

[0122] In one embodiment, the detection of the microdeletion and/or microduplication in the methods described herein is by multiplex ligation-dependent probe amplification (MLPA) analysis.

[0123] MLPA is a method to establish the copy number of up to 45 nucleic acid sequences in one single PCR amplification reaction. It can be applied on genomic DNA (both copy number detection and methylation quantification) as well as for mRNA profiling. It has been accepted as a simple and reliable method for multiplex detection of copy number changes of genomic DNA sequences using DNA samples derived from blood (Gille, J. J., et al. (2002), Br.J.Cancer, 87, 892-897; Hogervorst, F. B., et al. (2003) Cancer Res., 63, 1449-1453).

[0124] With MLPA, it is possible to perform a multiplex PCR reaction in which up to 45 specific sequences are simultaneously quantified. Amplification products are separated by sequence type electrophoresis. The peaks obtained in the sequence type electrophoresis, when compared with a control sample peak, allows one to determine the gene copy number of a probed gene or nucleic acid sequence in the test sample. As only one pair of PCR primers is used, MLPA reactions result in a very reproducible gel pattern with fragments ranging from 130 to 490 bp. Comparison of this gel pattern to that obtained with a control sample indicates which sequences show an aberrant copy number.

[0125] The general outline of MLPA is shown in FIG. 6 and fully described in Schouten, J. P. et al., (2002) Nucl. Acid Res. 30, e57. MLPA probes are designed that hybridizes to the gene of interest or region of genomic DNA that have variable copies or polymorphism. Each probe is actually in two parts, both of which will hybridize to the target DNA in close proximity to each other. Each part of the probe carries the sequence for one of the PCR primers. Only when the two parts of the MLPA probe are hybridize to the target DNA in close proximity to each other will the two parts be ligated together, and thus form a complete DNA template for the one pair of PCR primers used. When there are microdeletions, the provided MLPA probes that targets the deletion region will not form complete DNA template for the one pair of PCR primers used and so no or lower amount of PCR products will be formed. When there are microduplications, the provided MLPA probes that targets the duplicated region will form many complete DNA templates for the one pair of PCR primers used compared to a normal copy number sample of genomic DNA. The amount of PCR products formed will be more than in a control sample having a normal copy number of the region of interest.

[0126] MLPA probes are able to discriminate between sequences that differ in only one nucleotide. Moreover, MLPA reactions require a minimum of only 20 ng human DNA. In contrast to e.g. FISH and BAC-arrays, the sequences detected are small (˜60 nucleotides). Compared to other techniques, an MLPA reaction is fast, cheap (EUR 12, per reaction) and very simple to perform. The equipment required is present in most molecular biology laboratories: Thermocycler with heated lid and sequence type electrophoresis equipment.

[0127] The general protocol for MLPA is described in Schouten, J. P. et al., (2002) Nucl. Acid Res. 30, e57, and also can be found U.S. Pat. No. 6,955,901, these references are incorporated herein by reference in their entirety.

[0128] To screen the deletion/duplication of 16p11.2 region, four pairs of MLPA target-probes are designed based on the unique sequences of four genes within this interval: SPNF, MAZ, TAOK and TBX6. Additionally, four pairs of MLPA control probes were included, two pairs corresponding to unique sequences of SEPT1 and LAT genes located on chromosome 16 outside the deletion interval, and two pairs corresponding to unique sequences on other chromosomes. All probes were synthetic oligonucleotides. MLPA reagents are commercially available. Final PCR products can be analyzed on an ABI 3730XL for peak identification and quantification. Copy number alterations were visually inspected by superimposing the peak profile of a test sample with the profile of a normal sample using SoftGenetics GENEMARKER software. For actual copy number quantification, the peak areas can be exported to a Microsoft Excel worksheet. Peak area for each probe are normalized to the mean value for all control probes. The relative ratio of each peak are calculated by comparing between test sample and normal sample. Deletion are identified as relative ratio <0.75 and duplication as relative ratio >1.25.

[0129] In some embodiments, the MLPA target-probes used in the methods described herein are MLPA probes for the 16p11.2 region: GCTTCTCCTTCTCCTTGGGGTGCTGGTG (SEQ. ID No 25), GTAAGCCCAGACGCTCTGGGGAGCACAAC (SEQ. ID No 26), GACACGAGGAGAAAGTGCCATGTCACGTGT (SEQ. ID No 27), GTGGCAAGATGCTGAGCTCGGCTTATATTTCG (SEQ. ID No 28), GCTGGACAACCTGCAGTACCGCAAGATGAAG (SEQ. ID No 29), AAGATCCTGTTCCAAGAGGCACCCAACGGCCCTGG (SEQ. ID No 30), GTCAGTCACTGGCCTGGACCCCGAGGCCCGCTACTTGTTT (SEQ. ID No 31), and CTTCTGGATGTGATTCCGGTGGATGGGGCTCG (SEQ. ID No 32).

[0130] In some embodiments, the MLPA target-probes used in the methods described herein are MLPA probes for the 15q13.2q13.3 BP4-BP5 deletion/duplication region:

(SEQ. ID No 5)

CAATGACTCGCAACCACTCACCGTCTACTTCTC,

(SEQ. ID No 6)

CCTGAGCCTCCTGCAGATCATGGAC,

(SEQ. ID No 9),

CACAGCCAATCTGCCACATGTGTTCAATGAAGGGCGG,

(SEQ. ID No 10)

GGTCCCAAGCAGCCAGAGCGAGAGCCACAG,

(SEQ. ID No 15)

GTGTTATCAGCCACGTAGGGGATGCCTTGAAAGACCACTCCTC,

(SEQ. ID No 16)

CAAGTCCAGAGGCCGGGTTTGTGCTATAGGAATTG,

(SEQ. ID No 17)

GGAGGTCAGGGACAGCTTTCAACAGTCCTGTTGGTCAA,
and

(SEQ. ID No 18)

CCTCGGCCGAATGGAGTTTCCTAGTTACACCATCAATCGGAAAACC.

[0131] In one embodiment, these MLPA target-probes are synthetic oligonucleotides designed to incorporate the primer sequences for the MLPA amplification step as described by MRC-Holland, Amsterdam, The Netherlands.

[0132] In one embodiment, the detection of the microdeletion and/or microduplication in the methods described herein is by oligonucleotide-based array comparative genomic hybridization (oligonucleotide-based array CGH).

[0133] In one embodiment, the detection of the microdeletion and/or microduplication in the methods described herein is by bacterial artificial chromosome-based array comparative genomic hybridization (BAC-based array CGH).

[0134] CGH are methods of determining the relative number of copies of nucleic acid sequences in one or more subject genomes or portions thereof (for example, a tumor cell) as a function of the location of those sequences in a reference genome (for example, a normal human genome, one who is not diagnosed with autism). The intensity(ies) of the signals from each labeled subject nucleic acid and/or the differences in the ratios between different signals from the labeled subject nucleic acid sequences are compared to determine the relative copy numbers of the nucleic acid sequences in the one or more subject genomes or portions thereof. In U.S. Pat. Nos. 5,721,098, 5,665,549, 5,856,097, 5,976,790, 6,159,685, and 6,335,167 describes CGH and uses. These patents are incorporated herein by reference in their entirety.

[0135] As classical CGH has an average resolution of 10-20 megabases (Mb), it is able to detect changes affecting relatively large chromosomal regions. The introduction of array-based platforms has therefore greatly improved genomic profiling and currently, two technologies are mainly used for screening of DNA copy number; the BAC (Bacterial Artificial Chromosome) and the oligonucleotide-based CGH arrays. BAC-based CGH arrays are amongst the first genomic arrays to be introduced and are routinely used to detect single copy changes in the genome, owing to their high sensitivity.

[0136] In BAC-based array CGH, the CGH array chip is made using BAC amplified genomic sequences. The first whole genome microarray contained 2400 large-insert genomic clones, primarily bacterial artificial chromosomes (BACs). With the total human genome covering 3000 Mb, the resolution of this array is on average close to 1 Mb, about one order of magnitude higher than that obtained with classical CGH. For a full coverage resolution array 30,000 BACs have been arrayed, increasing the resolution with another order of magnitude.

[0137] In oligonucleotide-based array CGH, the chip is made using synthetic oligonucleic acid of ˜60 mer of specific target genes and/or genomic region, and the resolution can be reduced to ˜100 kb. In some embodiments, the oligonucleotide-based array CGH encompass array chip comprising synthetic oligonucleic acid of ˜60 mer of SPN, MAZ, TAO, TBX6, MTMR15, MTMR10, TRPM1, KLF13, OTUD7A and CHRNA7. In other embodiments, the Human Release 2.0 oligonucleotide library, containing 60mer oligonucleotides representing 28 830 unique genes can be obtained from Sigma-Genosys (Zwijndrecht, The Netherlands) and used in making a custom autism oligonucleotide-based array CGH chip. The oligonucleotides are dissolved at 10 μM concentration in 50 mM sodium phosphate buffer pH 8.5 and single spotted onto CODELINK™ slides (Amersham Biosciences), using an OMNIGRID® 100 microarrayer (Genomic Solutions, Ann Arbor, Mich., USA) equipped with SMP3 pins (TeleChem International, Sunnyvale, Calif., USA). After printing slides are processed and blocked prior to use according to the manufacturer's protocol.

[0138] Array CGH chips are available commercially from two companies, AGILENT and NIMBLEGEN. Both companies specializes in oligonucleotide-based array CGH chips. Custom design chips are also available. BAC-based array CGH chips are available from PERKINELMER®. Other CG H reagents and DNA labeling kits are available from PERKINELMER® and INVITROGEN™, Inc.

[0139] In one embodiment, the detection of the microdeletion and/or microduplication in the methods described herein is by fluorescence in situ hybridization (FISH). One ordinary skilled in the art will be able to perform FISH on chromosomal samples derived from individuals according to known standard protocols, such as those described in U.S. Pat. Nos. 5,665,540, 6,242,184 and 7,087,379. These patents are incorporated herein by reference in their entirety.

[0140] In one embodiment, the MLPA probes shown in Table 12 are used in FISH. In another embodiment, the MLPA probes shown in Table 12 are modified such as labeling with fluorescent dyes or a radioisotope. Other suitable labels, include, for example, radioisotopes (e.g., ¹²⁵I, ¹³¹I, ³⁵S, ³H, ³²P, ³³P, or ¹⁴C), fluorescent moieties (e.g., fluorescein, carboxyfluorescein, fluorescein-5-isothiocyanate (FITC), PerCP, rhodamine, or phycoerythrin (PE)), luminescent moieties (e.g., QDOT™ nanoparticles supplied by the Quantum Dot Corporation, Palo Alto, Calif.), or compounds that absorb light of a defined wavelength. Methods of detecting or quantifying a label depend on the nature of the label and are known in the art. Examples of detectors include, without limitation, x-ray film, radioactivity counters, scintillation counters, spectrophotometers, calorimeters, fluorometers, luminometers, and densitometers.

[0141] Unless otherwise explained, all technical and scientific terms used herein have the same meaning as commonly understood by one of ordinary skill in the art to which this disclosure belongs. Definitions of common terms in molecular biology can be found in The Merck Manual of Diagnosis and Therapy, 18th Edition, published by Merck Research Laboratories, 2006 (ISBN 0-911910-18-2); Robert S. Porter et al. (eds.), The Encyclopedia of Molecular Biology, published by Blackwell Science Ltd., 1994 (ISBN 0-632-02182-9); and Robert A. Meyers (ed.), Molecular Biology and Biotechnology: a Comprehensive Desk Reference, published by VCH Publishers, Inc., 1995 (ISBN 1-56081-569-8); Definitions of common terms in molecular biology may be found in Benjamin Lewin, Genes IX, published by Jones & Bartlett Publishing, 2007 (ISBN-13: 9780763740634); Kendrew et al. (eds.), The Encyclopedia of Molecular Biology, published by Blackwell Science Ltd., 1994 (ISBN 0-632-02182-9); and Robert A. Meyers (ed.), Molecular Biology and Biotechnology: a Comprehensive Desk Reference, published by VCH Publishers, Inc., 1995 (ISBN 1-56081-569-8).

[0142] Unless otherwise stated, the present invention was performed using standard procedures, as described, for example in Maniatis et al., Molecular Cloning: A Laboratory Manual, Cold Spring Harbor Laboratory Press, Cold Spring Harbor, N.Y., USA (1982); Sambrook et al., Molecular Cloning: A Laboratory Manual (2 ed.), Cold Spring Harbor Laboratory Press, Cold Spring Harbor, N.Y., USA (1989); Davis et al., Basic Methods in Molecular Biology, Elsevier Science Publishing, Inc., New York, USA (1986); or Methods in Enzymology: Guide to Molecular Cloning Techniques Vol. 152, S. L. Berger and A. R. Kimmerl Eds., Academic Press Inc., San Diego, USA (1987)).Current Protocols in Molecular Biology (CPMB) (Fred M. Ausubel, et al. ed., John Wiley and Sons, Inc.), Current Protocols in Protein Science (CPPS) (John E. Coligan, et. al., ed., John Wiley and Sons, Inc.) and Current Protocols in Immunology (CPI) (John E. Coligan, et. al., ed. John Wiley and Sons, Inc.), Current Protocols in Cell Biology (CPCB) (Juan S. Bonifacino et. al. ed., John Wiley and Sons, Inc.), Culture of Animal Cells: A Manual of Basic Technique by R. Ian Freshney, Publisher: Wiley-Liss; 5th edition (2005), Animal Cell Culture Methods (Methods in Cell Biology, Vol. 57, Jennie P. Mather and David Barnes editors, Academic Press, 1st edition, 1998) which are all incorporated by reference herein in their entireties.

[0143] It should be understood that this invention is not limited to the particular methodology, protocols, and reagents, etc., described herein and as such may vary. The terminology used herein is for the purpose of describing particular embodiments only, and is not intended to limit the scope of the present invention, which is defined solely by the claims.

[0144] Other than in the operating examples, or where otherwise indicated, all numbers expressing quantities of ingredients or reaction conditions used herein should be understood as modified in all instances by the term “about.” The term “about” when used in connection with percentages may mean±1%.

[0145] The singular terms “a,” “an,” and “the” include plural referents unless context clearly indicates otherwise. Similarly, the word “or” is intended to include “and” unless the context clearly indicates otherwise. It is further to be understood that all base sizes or amino acid sizes, and all molecular weight or molecular mass values, given for nucleic acids or polypeptides are approximate, and are provided for description. Although methods and materials similar or equivalent to those described herein can be used in the practice or testing of this disclosure, suitable methods and materials are described below. The term “comprises” means “includes.” The abbreviation, “e.g.” is derived from the Latin exempli gratia, and is used herein to indicate a non-limiting example. Thus, the abbreviation “e.g.” is synonymous with the term “for example.”

[0146] All patents and other publications identified are expressly incorporated herein by reference for the purpose of describing and disclosing, for example, the methodologies described in such publications that might be used in connection with the present invention. These publications are provided solely for their disclosure prior to the filing date of the present application. Nothing in this regard should be construed as an admission that the inventors are not entitled to antedate such disclosure by virtue of prior invention or for any other reason. All statements as to the date or representation as to the contents of these documents is based on the information available to the applicants and does not constitute any admission as to the correctness of the dates or contents of these documents.

### DEFINITIONS OF TERMS

[0147] As used herein, the term “autism”, refers to autism spectrum disorder which is also known as Pervasive Developmental Disorders (PDDs). Symptoms include difficulty in social skills, language and behavior. The term “autism” and autism spectrum disorder are used interchangeably herein.

[0148] As used herein, the term “comprising” means that other elements can also be present in addition to the defined elements presented. The use of “comprising” indicates inclusion rather than limitation.

[0149] The term “gene” means the nucleic acid sequence which is transcribed (DNA) and translated (mRNA) into a polypeptide in vitro or in vivo when operably linked to appropriate regulatory sequences. The gene may or may not include regions preceding and following the coding region, e.g. 5′ untranslated (5′UTR) or “leader” sequences and 3′ UTR or “trailer” sequences, as well as intervening sequences (introns) between individual coding segments (exons).

[0150] In the present invention, “isolated” refers to material removed from its original environment (e.g., the natural environment if it is naturally occurring), and thus is altered “by the hand of man” from its natural state. For example, an isolated nucleic acid from a cell which is substantially or essentially free from components which normally accompany or interact with the nucleic acid as found in the nucleus.

[0151] The term “nucleic acid” refers to deoxyribonucleotides or ribonucleotides and polymers thereof (“polynucleotides”) in either single- or double-stranded form. Unless specifically limited, the term encompasses nucleic acids containing known analogues of natural nucleotides that have similar binding properties as the reference nucleic acid and are metabolized in a manner similar to naturally occurring nucleotides. Unless otherwise indicated, a particular nucleic acid molecule/polynucleotide also implicitly encompasses conservatively modified variants thereof (e.g. degenerate codon substitutions) and complementary sequences as well as the sequence explicitly indicated. Specifically, degenerate codon substitutions may be achieved by generating sequences in which the third position of one or more selected (or all) codons is substituted with mixed-base and/or deoxyinosine residues (Batzer et al., Nucleic Acid Res. 19: 5081 (1991); Ohtsuka et al., J. Biol. Chem. 260: 2605-2608 (1985); Rossolini et al., Mol. Cell. Probes 8: 91-98 (1994)). Nucleotides are indicated by their bases by, the following standard abbreviations: adenine (A), cytosine (C), thymine (T), and guanine (G).

[0152] As used herein, the term “genomic DNA” refers to the DNA which is found in the organisms genome and is passed on to offspring as information necessary for survival. The “genomic DNA” is also the “nucleic acid” that is isolated from nucleated cells.

[0153] As used herein, the term “microdeletion” in the genomic DNA refers to absence of a stretch of DNA sequence that is normally found in the genome of a normal individual. The missing stretch of DNA sequence can range from 100 kb to 2 Mb.

[0154] As used herein, the term “microduplication” in the genomic DNA refers to the presence of extra copies of a stretch of DNA sequence that is normally found as single or limited copy in the genome of a normal individual.

[0155] As used herein, a normal individual is one who has not diagnosed with autism, developmental delay or mental retardation.

[0156] The present invention can be defined in any of the following alphabetized paragraphs.
[0157] [A] A method for diagnosing an autism spectrum disorder in a human individual or a human fetus, the method comprising determining whether or not the human individual or the human fetus carries an about a 500 kb long microdeletion that is flanked by an about 100 kb to about 147 kb long microduplication on a chromosome 16p11.2 region between 29.5 Mb and 31.1 Mb, wherein presence of the about 500 kb long microdeletion that is flanked by the about 100 kb to about 147 kb long microduplication on the chromosome 16p11.2 region between 29.5 Mb and 31.1 Mb is indicative of diagnosis of the autism spectrum disorder in the human individual or the human fetus.
[0158] [B] The method of paragraph [A], wherein the microdeletion comprises SPN, MAZ, TAO K2, and TBX6 genes.
[0159] [C] The method of paragraph [A], wherein the microduplication is about 147 kb long.
[0160] [D] The method of paragraph [A], wherein the determination is performed using an oligonucleotide-based array comparative genomic hybridization (oligonucleotide-based CGH).
[0161] [E] The method of paragraph [A], wherein the determination is performed using a bacterial artificial chromosome-based array comparative genomic hybridization (BAC-based CGH).
[0162] [F] The method of paragraph [A], wherein the determination is performed using a fluorescence in situ hybridization (FISH).
[0163] [G] The method of paragraph [A], wherein the determination is performed using a multiplex ligation-dependent probe amplification (MLPA).
[0164] [H] A method for diagnosing an autism spectrum disorder in a human individual or a human fetus, the method comprising determining whether or not the human individual or the human fetus carries a between 500 kb and 2 Mb microduplication on chromosome 15q13.2q13.3 between a BP4 and a BP5 region, wherein presence of the between 500 kb and 2 Mb long microduplication on chromosome 15q13.2q13.3 between the BP4 and the BP5 region is indicative of diagnosis of the autism spectrum disorder in the human individual or the human fetus.
[0165] [I] The method of paragraph [H], wherein the microduplication is about 500 kb long.
[0166] [J] The method of paragraph [H], wherein the determination is performed using an oligonucleotide-based array comparative genomic hybridization (oligonucleotide-based CGH).
[0167] [K] The method of paragraph [H], wherein the determination is performed using a bacterial artificial chromosome-based array comparative genomic hybridization (BAC-based CGH).
[0168] [L] The method of paragraph [H], wherein the determination is performed using a fluorescence in situ hybridization (FISH).
[0169] [M] The method of paragraph [H], wherein the determination is performed using a multiplex ligation-dependent probe amplification (MLPA).
[0170] [N] A method for diagnosing an autism spectrum disorder in a human individual or a human fetus, the method comprising determining whether or not the human individual or the human fetus carries a between about 500 kb and about 2 Mb long microdeletion on chromosome 15q13.2q13.3, wherein presence of the between about 500 kb and about 2 Mb long microdeletion on chromosome 15q13.2q13.3 is indicative of diagnosis of the autism spectrum disorder in the human individual or the human fetus.
[0171] [O] The method of paragraph [N], wherein the microdeletion on chromosome 15q13.2q13.3 is located between a BP4 and BP5 region of the chromosome 15q13.2q13.3.
[0172] [P] The method of paragraph [N], wherein the microdeletion is about 500 kb long.
[0173] [Q] The method of paragraph [N], wherein the wherein the microdeletion comprises MTMR15, MTMR10, TRPM1, KLF13, OTUD7A, CHRNA7 and miRNA gene (hsa-mir-211). genes.
[0174] [R] The method of paragraph [N], wherein the determination is performed using an oligonucleotide-based array comparative genomic hybridization (oligonucleotide-based CGH).
[0175] [S] The method of paragraph [N], wherein the determination is performed using a bacterial artificial chromosome-based array comparative genomic hybridization (BAC-based CGH).
[0176] [T] The method of paragraph [ ], wherein the determination is performed using a fluorescence in situ hybridization (FISH).

[0177] This invention is further illustrated by the following examples which should not be construed as limiting. The contents of all references cited throughout this application, as well as the figures and table are incorporated herein by reference.

### Example 1

### Focus Oligonucleotide-Based Array CGH for Clinical Diagnosis

[0178] Genomic imbalance causes a variety of human genetic disorders, ranging from imbalance of entire chromosomes, as in Down syndrome, to submicroscopic rearrangements, as in the 22q11 deletion that causes DiGeorge/velocardiofacial syndrome. Genomic imbalance also causes idiopathic mental retardation (Shaw-Smith C, et. al., 2004, J Med Genet., 41:241-8; Schoumans J, et. al., 2005, J Med Genet., 42: 699-705) and is detectable in approximately 3%-4% of cases (Shevell M, et al., 2003, Neurology, 60:367-80) by traditional cytogenetic methods, such as karyotype and fluorescence in situ hybridization (FISH) analyses (Bejjani and Shaffer, 2006, J Mol Diagn., 8:528-33). These traditional cytogenetic methods are labor intensive, especially when multiple genomic regions are interrogated. genomic copy number of multiple targets (de Vries BB, et al., 2005, Am J Hum Genet, 77:606-16). Microarray-based comparative genomic hybridization (CGH) offers the ability to interrogate many more genomic regions in a single assay. Early CGH arrays were composed of large-insert bacterial artificial chromosome (BAC) clones (Pinkel D, et al., 1998, Nat Genet., 20:207-11). BAC-based arrays have revolutionized the detection of genomic imbalance in clinical cytogenetic laboratories (Bejjani and Shaffer, supra; Bejani BA, et al., 2005, Expert Rev Mol Diagn., 5:421-9) but are challenging to develop, validate, and manufacture. The fact that BAC clones in standard libraries may be inaccurately mapped could lead to diagnostic errors without careful validation (Bejiani BA, et al., 2005, Am J Med Genet A., 134:259-67). Additionally, BAC clone inserts average approximately 150 kb, limiting the resolution of detectable copy-number variants (CNVs) to the size of a BAC insert. Deletion breakpoints that extend beyond the BAC clone cannot be accurately determined. Once validated, BAC arrays are much more efficient than multiplex FISH analysis, but genetic information is constantly changing. Consequently, updates to a BAC-based array require successive rounds of extensive probe validation.

[0179] Oligonucleotide-based arrays offer advantages over BAC-based arrays, and many platforms are available. Oligonucleotide arrays designed for genotyping single-nucleotide polymorphisms may not provide uniform coverage at all sites of genomic imbalance (Friedman J M, et. al., 2006, Am J Hum Genet., 79:500-13; Ylstra B, et. al., 2006, Nucleic Acids Res., 34:445-50). Custom oligonucleotide arrays that are based on libraries of validated synthetic probes can interrogate clinically relevant genomic regions without the need for large-insert clone libraries. We describe an array based on AGILENT's eArray library, a large collection of 60-mer oligonucleotides specifically selected for robust copy-number analysis (see AGILENT Technologies. eArray 4.5. (accessed August 2006)). This targeted oligonucleotide-based array provides a flexible and adaptable method for CGH to detect genomic copy-number imbalance in the clinical diagnostic laboratory.

### Materials and Methods

### Abbreviations

[0180] Nonstandard abbreviations: FISH, fluorescence in situ hybridization; MLPA, multiplex ligation-dependent probe amplification; CGH, comparative genomic hybridization; BAC, bacterial artificial chromosome; CNV, copy-nunber variant; SNR, signal-to-noise ratio. Human genes: CTNS, cystinosis, nephropathic; NPHP1, nephronophthisis 1 (juvenile); CARKL, carbohydrate kinase-like.

### Validation Samples

[0181] DNA was obtained from the material remaining from 105 samples after previous clinical assays had been completed for patients who originally had been referred for genetic testing with BAC-based array CGH, FISH, karyotyping, or MLPA in the DNA Diagnostic Laboratory at Children's Hospital Boston and the Medical Genetics Laboratories at Baylor College of Medicine. Genomic imbalance was previously identified in 51 (49%) of the 105 samples. Samples with positive results from prior testing were assigned to a “validation set” and subjected to oligonucleotide-array CGH analysis in these 2 laboratories with the array platform described below. Laboratory personnel were blinded to prior testing results. The Children's Hospital Boston Institutional Review Board approved this project.

### Clinical Samples

[0182] After assay validation, we performed clinical array CGH testing of 211 consecutively submitted samples from presumably unrelated children. Samples were submitted after referral to specialists in the Divisions of Clinical Genetics and Developmental Medicine, and the Departrnent of Neurology for clinical molecular-diagnostic testing. The referring diagnoses for these patients included developmental delay, mental retardation, dysmorphic features, or multiple congenital anomalies. All samples were compared with a reference sample for standard 2-color array CGH, either a 46,XY male or a 46,XX female sample. Reference DNA was purchased from Promega.

[0183] Genomic DNA was extracted from whole blood for all samples with a D50K PUREGENE® DNA-isolation reagent set (QIAGEN®/Gentra) according to the manufacturer's instructions. All DNA was stored at −20° C.

### Chip Design

[0184] This focused oligonucleotide chip covers 179 clinically relevant regions of genomic imbalance, including all sub-telomeric and pericentromeric regions, and 95 regions responsible for well-defined microdeletion/microduplication syndromes, mental retardation, and autism. A summary of array coverage is shown on Table 2. A total of 10207 region-specific features and 603 quality-control and negative-control features selected from AGILENT's eArray library are randomly located on the array with a mean spatial resolution of <35 kb within the targeted regions. Each sub-telomeric region has a minimum coverage of 5 Mb. A subset of 660 features is duplicated on each block as a quality-control measure. Arrays were manufactured with AGILENT's SurePrint Inkjet technology. In designing the targeted oligonucleotide-based array, we consulted the Database of Genomic Variants to avoid CNVs with no apparent clinical relevance.

### Comparative Genomic Hybridization (CGH)

[0185] Oligonucleotide-array CGH was performed according to the manufacturer's Oligonucleotide Array-Based CGH for Genomic DNA Analysis protocol (version 3; AGILENT Technologies). Briefly, three μg of DNA (both test sample and control sample) were double digested with Alu I and Rsa I and subsequently purified with QIAPREP® Spin Miniprep kit (QIAGEN® GmbH, Hilden, Germany). Digested samples were labeled with Cy3-dUTP or Cy5-dUTP (Amersham Bioscience, UK) using the Bioprime array CGH DNA Labeling System (INVITROGEN™ Life Technologies, Carlsbad, Calif., USA); paired samples were mixed and subsequently purified by MICROCON® YM-30 (MILLIPORE®, Billerica, Mass., USA). Labeled probes were mixed with Cot-1 DNA (INVITROGEN™ Life Technologies, Carlsbad, Calif., USA), blocking solution and hybridization solution (AGILENT Technologies, Palo Alto, Calif., USA) and hybridized to our 2×11K focused chip and 244K Human Oligo chip (AGILENT Technologies, Palo Alto, Calif., USA). Hybridizations were performed in a 65° C. oven on a rotating rack for 40 hrs. Arrays were washed with wash 1 and 2 solutions (AGILENT Technologies, Palo Alto, Calif., USA) and scanned immediately using the AGILENT scanner.

[0186] Dye-swap verification was performed on all samples with positive findings. For other confirmation assays, we carried out BAC-array CGH and FISH confirmation as described previously (Cheung SW., et. al., 2005, Genet Med., 7:422-32). MLPA confirmation was performed as described previously (Shao H, et. al., 2005, Beijing Da Xue Xue Bao; 37:64-7). The MLPA oligonucleotides for the CTNS (cystinosis, nephropathic) gene are as follows: exon 2, GTTTTCACACTGGGCGAAGGGAGGACT (SEQ. ID. No. 37) and CCTGAGCTCTGCCTCTTCCAGTAACATTG (SEQ. ID. No. 38); exon 6, CCGAGGATACGCTTTCTTGTGATCC (SEQ. ID. No. 39) and GCAGCAGCGCCATTAGCATCATAAACC (SEQ. ID. No. 40); exon 12, CAACCAAGTTTGGACTCGGGGT (SEQ. ID. No. 41) and CTTCTCCATCGTCTT CGACGTCGTC (SEQ. ID. No. 42).

### Data Analysis

[0187] Scanned images were quantified with Feature Extraction software (version 9.0; AGILENT Technologies). We used the signal-to-noise ratio (SNR) and the normalized log₂ ratio (test/reference) with 40 nonpathologic individual DNA samples to evaluate the quality and variability of each feature/target. The SNR was calculated by dividing the mean signal intensity of each feature by the mean background signal intensity. Features with a mean SNR <4 or an SD of the log₂ ratio >0.1 were considered to have poor signal quality and high variability and were filtered out before further analysis. These thresholds were chosen empirically and are similar to those used in similar studies (Shaw-Smith C, et. al., 2004, J Med Genet, 41:241-8; Wong KK, et. al., 2007, Am J Hum Gene, 80:91-104).

[0188] We visualized the filtered data further with CGH Analytics software (version 3.4; AGILENT Technologies) and evaluated the quality of each test with the quality-control metrics generated with CGH Analytics software. Copy-number aberration was indicated with the Aberration Detection Method 2 algorithm for the data that passed quality-control testing. The Aberration Detection Method 2 algorithm finds intervals of varying size with a consistent, appreciably low, or high log₂ ratio. An aberration filter was set to indicate regions with at least 3 targets showing the same direction in copy-number change. The mean log₂ ratio of each region of potential imbalance was calculated and compared with the SD for the whole dataset. A copy-number gain was called if the mean log₂ ratio was greater than twice the SD of the whole dataset, and a loss was called if the mean was less than −2 SDs. These thresholds were chosen empirically and are similar to those used in other such studies (Locke DP, et. al., 2006, Am J Hum Genet., 79:275-90; Sharp AJ, et. al., 2006, Nat Genet, 38:1038-42). Cutoff values for genomic imbalance can be adjusted and set accordingly with the threshold function of CGH Analytics software, especially when a potential mosaic scenario is encountered. Variants not known to be pathogenic were compared with the Database of Genomic Variants, which can be found at the world wide web at http “colon” “double forward slash” projects “period” tcag “period” ca “forward slash” variation “forward slash” to facilitate interpretation.

### Results

### Evaluation of Target Loci and Overall Chip Performance

[0189] Forty sex-matched samples from healthy individuals were analyzed on the array, including 2 self-self hybridizations, to evaluate each feature on the array. Signal quality, log₂ ratio variability, mean SNR, and SD of the log₂ ratio were calculated for each non-control feature. The mean and median signal intensities of all the non-control features were 251 and 178, respectively. The mean and median values of the mean SNRs from all non-control features were 9.05 and 6.39, respectively. More than 91% of the target features had a mean SNR >4. Mean log₂ ratios were distributed symmetrically around the zero value. Only a small fraction of features (52 of 10 025,0.52%) exhibited mean values >0.1 or <−0.1. These features were excluded from the dataset before further analysis. The mean SD of the log₂ ratio of all non-control features was 0.062 (median SD, 0.055).

[0190] We demonstrated a log₂ ratio SD of >0.1 for 714 features (7.12%); we categorized these features as non-ideal targets and excluded them from further analysis. More than 90% of the features passed the feature level filter criteria: an absolute mean log₂ ratio <0.1, a log₂ ratio SD<0.1, and a mean SNR >4. After excluding non-ideal features, the dataset quality improved dramatically. For example, the SD of the 10g2 ratio dropped from >0.06 to <0.03. Features with a large log₂ SD largely overlapped those with a low SNR, further validating this filtering approach. Because the non-ideal targets are approximately evenly distributed across the target regions, the overall resolution of the chip is not appreciably affected.

[0191] Several key variables were used to evaluate chip quality and to describe the quality of the dataset as a whole. These variables included probe-to-probe log₂ ratio noise (DLRSpread), the median signal intensity of both channels, background noise for both channels, and SNR. The following cutoffs were used to pass our quality-control testing: DLRSpread ˜0.25, median signal intensity ˜50, background noise ˜10, and SNR ˜15. None of the samples failed quality-control testing because of poor chip quality or problems with hybridization. Two samples failed testing because of DNA impurities; both samples passed quality-control tests after we repurified the DNA.

Chip Validation with Blinded Samples

[0192] We next blindly tested 65 samples for further chip validation. Genomic imbalance had previously been detected in 51 of the 65 samples by BAC-array CGH, FISH, karyotyping, or MLPA, or by some combination of these analyses, and these 51 samples served as positive controls for validation. The remaining 14 samples had previously been tested by targeted BAC-array CGH with non-pathologic results and thus served as negative controls for validation. All samples were traceable to the technologist who performed the hybridizations.

[0193] Of the 51 validation samples with a previously detected genomic imbalance (Table 3), the samples from 2 cases demonstrated aneuploidy for an entire chromosome, 3 cases involved unbalanced chromosomal rearrangements, 13 cases had subtelomeric deletions/duplications, 17 cases had interstitial deletions/duplications, and 15 cases were associated with known segmental aneuploidy regions, including Angelman/Prader-Willi syndrome (4 cases), atypical Angelman syndrome on 22q13.3 (1 case), an autism phenotype associated with duplication of 15q11-q13 (1 case), a velocardiofacial/DiGeorge syndrome region (5 cases with deletions and 2 with duplication), and Williams-Beuren syndrome (2 cases).

[0194] Across all samples, results from oligonucleotide-array CGH were consistent with the results obtained with the 4 prior methods, but oligonucleotide-based array CGH provided the most precise breakpoint boundaries. FIG. 1 shows a genomic-imbalance event (2q37.3 deletion) identified by oligonucleotide-based array CGH. FISH also confirmation of the 2q37.3 deletion (data not shown).

[0195] Oligonucleotide-array CGH detected no appreciable imbalance events in any of the 14 negative controls, with the exception of several reported CNVs. The dye-swap scheme essentially eliminated false-positive results.

[0196] To further evaluate the confidence of each imbalance call by oligonucleotide-array CGH analysis, we calculated the mean log₂ ratios for each detected imbalance region and compared them with the SD for the whole dataset. The value of the mean log₂ ratio/SD indicates the separability of each imbalance event from the background noise of the whole dataset. For the majority of deletion events detected, the value was less than −3.2, whereas the value was >2.6 for the majority of gain events detected.

### Genomic Imbalance Detected in Clinical Samples

[0197] We used focused oligonucleotide-array CGH to test 211 clinical samples that had been ascertained to have come from individuals with developmental delay, unexplained mental retardation, dysmorphic features, or multiple congenital anomalies. In this cohort, the detection rate for genomic imbalance was approximately 11.9% (25 of 211 samples). All abnormal findings were first verified with a dye-swap array CGH and then independently confirmed by either FISH or MLPA. All the genomic-imbalance events, including CNVs with unknown significance, were divided into 3 categories, as is described below. The imbalance events associated with known disorders or likely to cause disease are listed in Table 1.

Genomic Imbalance Associated with Well-Defined Disorders

[0198] Table 1A lists 12 samples with 10 genomic imbalance events associated with known genetic disorders. In this group, 2 of the samples revealed a complex pattern involving both gain and loss on 2 different chromosomes (case 1) or on the same chromosome (case 2), 2 samples had a well-defined microdeletion syndrome (cases 3 and 4), 1 sample had a subtelomeric deletion (case 5), and 2 samples had whole-chromosome aneuploidy (cases 6 and 7). One dominantly inherited disorder could be diagnosed by the detection of haploinsufficiency for the relevant gene (cases 8 and 9), and 3 cases involved carriers of a recessive allele: deletion at the NPHP1 [nephronophthisis 1 (juvenile); cases 10 and 11] and CTNS loci (case 12). The last 3 cases featured deletions of <100 kb, each of which covered defined disease genes.

[0199] Oligonucleotide-array CGH was able to detect cryptic rearrangements, submicroscopic alterations, and even single-gene deletions. The smallest imbalance event detected in this study was a heterozygous genomic deletion of 3 consecutive probes covering a minimal 23-kb interval. FIG. 2A shows the targeted array CGH data, and deletion of the 3 targets was confirmed by dye-swap hybridization (green in the forward hybridization and red in the reverse hybridization). In this case, we repeated the CGH analysis with AGILENT's 244K whole-genome oligonucleotide array and confirmed the deletion, which includes the entire CARKL (carbohydrate kinase-like) gene and part of CTNS (FIG. 2B). The partial deletion of CTNS was independently confirmed by MLPA analysis. FIG. 2C shows a 1-copy deletion for CTNS exons 2 and 6 and a typical dosage for CTNS exon 12. To further characterize the deletion, we amplified the deletion junction by the PCR and confirmed by sequencing (FIG. 2D) that the deletion detected by array CGH is the common “European” deletion associated with cystinosis (Forestier L, et. al., 1999, Am J Hum Genet; 65:353-9). This case further demonstrated the excellent resolution and sensitivity of the custom oligonucleotide-array CGH method.

### Genomic Imbalance Probably Cause a Disorder

[0200] Table 1B lists 5 samples with interstitial deletions/duplications that may be clinically relevant. The list includes 3 interesting cases: a 3.6-Mb duplication at 17p11.2, which is similar to that of a recently reported 17p11.2-duplication syndrome (Potocki L, et. al., 2007, Am J Hum Genet., 80:633-49), and 2 cases of a 546-kb de novo deletion at 16p11.2, which is within a region of frequently observed cytogenetic polymorphism but is not observed in the CNV database. Neither individual with the de novo 546-kb 16p11.2 deletion had specific dysmorphic features, but the absence of this deletion in the parents suggests that the deletion is responsible for the phenotype of developmental delay.

Genomic CNVs with Unknown Significance

[0201] Nine patients had unreported CNVs with relatively small genomic deletions of between 50 and 200 kb (data not shown). The clinical significance of these imbalance events is unclear. Although this custom oligonucleotide array was designed to avoid CNVs, many new CNV loci have been reported since the design of the array, which can be found at the world wide web at http “colon” “double forward slash” projects “period” tcag “period” ca “forward slash” variation “forward slash”.

[0202] Array CGH is a valuable clinical diagnostic assay for patients with mental retardation and other genetic conditions. Although high-resolution whole-genome oligonucleotide microarrays are commercially available for research, targeted array CGH offers several advantages in a clinical diagnostic laboratory (Bejjani BA, et. al., 2005, Am J Med Genet A, 134:259-67). We chose genomic regions with well-documented clinical relevance, analogous to those of the currently accepted BAC-based arrays designed by the leading array CGH laboratories (Baylor College of Medicine. Chromosomal Microarray Analysis; Signature Genomic Laboratories). Genomic imbalance identified on the targeted oligonucleotide array can be verified with existing FISH or MLPA probes, whereas secondary methods are not readily available for a whole-genome array.

[0203] Using 60-mer oligonucleotide probes that are synthesized robotically in situ to manufacture the oligonucleotide-based arrays, we were able to eliminate variability in BAC inserts or DNA contamination between batches and potentially affecting the reproducibility and consistency of the manufactured BAC-based arrays. Moreover, the 60-mers have a fixed GC content and melting temperature that facilitate uniform hybridization, thus reduces the amount of the variability in the performance of some probes.

[0204] The sensitivity and specificity of the oligonucleotide-array platform were excellent because of the high SNRs and low SDs. We observed the SDs of all targets to be consistently <0.1—with the majority being <0.08—with this oligonucleotide-based array. Given the nice separability of imbalance events above the baseline, we can identify genomic-imbalance events with a high level of confidence. In addition to the 100% concordance between the oligonucleotide-array CGH results and the results generated by other methods for both positive and negative samples, we were able to identify smaller imbalance events (unreported CNVs; data not shown) that were not detected with other methods.

[0205] Oligonucleotide platforms can quickly and easily accommodate changes in genomic coverage. Manufacturing costs are not prohibitive and the list of available probe sequences extends the length of the genome. Thus, updates to oligonucleotide-based arrays can be accomplished more quickly and with less postproduction validation than BAC-based arrays, which require new BAC clones to be individually validated and DNA to be prepared from each clone before chips can be manufactured.

[0206] This focused oligonucleotide-based array CGH platform detected all genomic-imbalance events in the 65 validation samples, with 100% concordance with BAC-based array CGH, FISH/karyotyping, or MLPA. Coverage of clinically relevant loci (see Supplemental Data 1 in the online Data Supplement) is equivalent to other BAC-based targeted array CGH platforms. The enhanced sensitivity and specificity of oligonucleotide-array CGH compared with other methods are attributable to better resolution and the custom design, respectively.

### Example 2

[0207] Autism is a pervasive developmental disorder defined by a neurobehavioral phenotype that includes social disability, communication impairment, repetitive behaviors, and restricted interests.

[0208] The relative genetic contribution to a susceptibility to autism from de novo mutations, rare mutations, and common polymorphisms has been debated extensively (Zhao X, et. al., 2007, Proc Natl Acad Sci USA, 104:12831-12836). Recent whole-genome studies assessing copy-number variation4 reported an excess of large de novo copy-number variants, with such events reported in 7 to 10% of simplex families, 2 to 3% of multiplex families, and only 1% of control families (Szatmari P, et. al., 2007, Nat Genet, 39:319-328; Sebat J, et. al., 2007, Science, 316:445-449). Although these data imply a role for de novo copy-number variation, no recurrent events were identified and implicated as having an unequivocal association with autism.

[0209] We therefore carried out a high-resolution genomewide analysis of a sample of multiplex families in the Autism Genetic Resource Exchange (AGRE) (Geschwind DH, et al., 2001, Am J HuRn Genet, 69:463-466) with the use of the AFFYMETRIX® 5.0 genotyping platform. This platform offers not only single-nucleotide polymorphism (SNP) probes but also a dense collection of SNP invariant probes, which combine to enable detection of copy-number variation. In this study, we describe a screening technique for recurrent de novo autosomal copy-number variants that could influence susceptibility to autism with follow-up analysis of clinical genetic-testing data from Children's Hospital Boston and a large population sample from Iceland (studied at DECODE™ Genetics).

### Materials and Methods

### Study Design

[0210] The samples and methods that we used are summarized in Table 4.

### AGRE

### Samples

[0211] The Autism Genetic Resource Exchange (AGRE) has a collection of DNA from multiplex families with autism spectrum disorder (ASD) available for genetic research (Geschwind DH, et al., 2001, Am J Hum Genet, 69:463-6). We genotyped 751 families, selecting for those with at least one child diagnosed with autism by the Autism Diagnostic Interview-Revised (ADI-R) (Lord C, et al., 1993, Infant Mental Health, 14:234-52), while the second affected child had an AGRE classification of autism, broad spectrum (patterns of impairment along the spectrum of pervasive developmental disorders, including PDD-NOS and Asperger's syndrome) or Not Quite Autism (NQA, individuals who are no more than one point away from meeting autism criteria on any or all of the social, communication, and/or behavior domains and meet criteria for “age of onset”; or, individuals who meet criteria on all domains, but do not meet criteria for the “age of onset”). The self-reported race/ethnicity of these samples is 69% white, 12% Hispanic/Latino, 10% unknown, 5% mixed, 2.5% each Asian and African American, less than 1% Native Hawaiian/Pacific Islander and American Indian/Native Alaskan.

[0212] We excluded families with known chromosomal abnormalities (where karyotyping was available), and those with inconsistencies in genetic data (generating excess Mendelian segregation errors or showing genotyping failure on a test panel of 24 SNPs used to check gender and sample identity with the full array data). Our final dataset included 1,441 affected individuals (1,252 autism, 123 broad spectrum, 66 NQA), 1,420 parents, and 132 unaffected/unknown siblings (Table 4). Some of these same samples were analyzed on AFFYMETRIX® 500K and 5.0 arrays at Johns Hopkins, and analyzed for copy number using AFFYMETRIX® CNAT 4.0 software.

### Controls

[0213] Additional samples from other ongoing studies used as controls for this study were 1087 cases with bipolar disorder from STEP-BD and 1727 controls obtained from the NIMH Genetics Repository genotyped on the AFFYMETRIX® 500K platform (Sklar P, et al., 2008 Mol Psych. In Press.), and analyzed for CNVs with COPPER (see below).

### Genotyping

[0214] The samples were genotyped on AFFYMETRIX® 5.0 chips at the Genetic Analysis Platform of the Broad Institute. The 5.0 chip was designed to genotype nearly 500,000 SNPs across the genome in order to enable genome-wide association studies, as well as to improve the assessment of dosage changes by adding 500,000 sequence invariant probes (100,000 of which were targeted towards 1,900 regions of known common copy number polymorphism). In this study, the raw intensity data from these chips is analyzed with two novel algorithms, COPPER and Birdseye, described below. In addition to standard quality control of scans, intensity data was examined for excess variance after normalization. Genotype calling (used here for allele normalization) and quantile normalization of arrays was performed within Birdseed or BRLMM. Both the genotype data and raw intensity files have been released to AGRE, and are available to the research community under AGRE guidelines.

### Analysis COPPER

[0215] COPy number Polymorphism Evaluation Routine (COPPER, developed by LAW, MARF with technical assistance from DMR) is a method that utilizes allele-specific intensity data from SNP probes to estimate copy number across the genome. It leverages large sample sizes in normalization and can detect small recurrent events in the population (including those that encompass only two local SNP probes). Additionally, it summarizes information from neighboring SNPs per individual to detect larger events (at least six SNP probes) present in single or few samples. Furthermore, COPPER can output normalized intensity data for verification of events by visual examination.

[0216] Briefly, it involves 4 steps: 1) normalization of intensity data, 2) copy number calling for each SNP probe, 3) consensus calling for pairs of nearby SNPs, and 4) summarizing data into copy number events. 1) Allele-specific intensity data is normalized and scaled to reflect copy number by assuming that the median intensity for allele A in individuals genotyped as AA corresponds to two copies, the median intensity for allele A in individuals genotyped as AB corresponds to one copy, and the median intensity for allele A in individuals genotyped as BB corresponds to zero copies; likewise for allele B. 2) After adjusting each individual to a genome-wide average of copy number two, the allele-specific quantitative estimates are converted into integer calls of zero to four for each allele and summed across alleles for a copy number call at each locus. 3) Then ‘consensus markers’ are created by comparing copy number calls for each SNP with the most correlated flanking SNP (considering three on each side), and creating one marker from that pair by setting conflicting calls to missing. Each SNP cannot be used more than once to create a consensus marker. 4) Next, each individual is scanned in windows of five consensus SNPs (stepping by two), and a copy number variant is called if three of the markers in the window are consistent with deletion (copy number <2) or duplication (copy number >2). Therefore, a minimum of six SNPs (3 consensus markers) must reflect copy number less than or greater than two to make a CNV call, reducing false positive calls. Finally, these window calls are summarized into events in each individual with estimated boundaries, and overlapping events are summarized into regions of copy number variation across the sample, with output indicating the number of cases and controls with CNVs in each region, odds ratio, number of positive markers, etc. This method will be described in more detail in a subsequent publication.

[0217] Birdseye (developed by JMK) uses both the SNP and copy number probes available on the AFFYMETRIX® 5.0 array to detect copy-number variants (CNVs). On an individual by individual basis, it considers the intensity deviation of each probe using models built from copy number differences on the X chromosome. Birdseye then identifies regions of dosage abnormality in individual samples by combining probe information using a Hidden Markov Model with five states (dosage=0, 1, 2, 3, 4) and employing the standard Viterbi algorithm (Viterbi A.1967, IEEE Trans Inform Theory, 13:260-9), and generates LOD scores expressing the likelihood of deviation from copy number two in any region. Scans for de novo deletion and duplication events were performed by requiring LOD>6 (i.e., million to one odds) in favor of deletion/duplication in the child but no deletion/duplication in either parent (also with LOD>6).

[0218] Briefly, each locus on each plate is modeled independently using empirical data. The response characteristics of each probe are maximum likelihood estimates of mixtures of Gaussians, assuming most samples have normal copy number at that locus. The response of copy number probes is a single Gaussian that best explains the distribution of sample intensities observed, while for SNPs the response is a mixture of 3 Gaussians which are learned using Birdseed (the SNP genotyping algorithm). These Gaussians define the copy-normal clusters. Copy-variable clusters (locus responses) are imputed from these, using a linear regression model built from chromosome X probes (which show differential response for haploid males versus diploid females). Each sample is then independently analyzed using a 5-state HMM-one state per copy number (where copy number at each locus is assumed to be 0, 1, 2, 3, or 4). The models for individual probes serve as point-estimates for the probability of being in each potential copy number state. The transitional probabilities are set low (0.0002 to transition from 2 to variable copy number, 0.05 to transition back to normal copy number, and 0.0001 to transition between two different copy variable states) to reflect the low expected number of CNVs in each genome. The Viterbi best path of copy number states along the genome is then computed for each sample, and for each discovered event a LOD score is reported that reflects the relative probability of the event being true versus false given the observed data.

[0219] To assess performance, we performed an in-silico gender mixing experiment. For each probe on the X chromosome, mixture models were built using only female data from a single plate. The order of probes was randomly permuted in order to remove any true CNVs present. We then simulated a deletion by taking the intensity of a female sample for 200 consecutive probes, followed by the intensity of a male sample for N probes, and then another sequence of 200 probes for which female intensity was used (where N is 0, 3, 5, 10, or 20). Each deletion size was simulated 1000 times.
[0220] 3 Probe Deletions:
[0221] 30% found; 28% if limit to correct breakpoints within 1 probe median LOD 1.13 (mean 1.32)
[0222] 55% of those found have LOD>1
[0223] 5 Probe Deletions:
[0224] 75% found; 71% if limit to correct breakpoints within 1 probe median LOD 2.42 (mean 2.70) 80% of those found have LOD>1 10 probe deletions:
[0225] 98% found; 93% if limit to correct breakpoint within 2 probes
[0226] median LOD 7.80 (mean 7.98) 990% of those found have LOD>1 20 probe deletions:
[0227] 990% found; 93% if limit to correct breakpoint within 2 probes
[0228] median LOD 19.95 (mean 20.00) 991% of those found have LOD>1

[0229] Two (false positive) duplications with LODs of 0.19 and 1.16 were found in the simulation, which covered 2,000,000 non-deleted probes (approximately 1 full genome's worth of data). No false deletions were found.

### Children's Hospital Boston Samples

[0230] Array comparative genomic hybridization (CGH) was performed on 997 consecutively submitted clinical samples, after referral by specialists in Clinical Genetics, Neurology, and Developmental Medicine at Children's Hospital Boston. These fell into two groups: 512 had a primary diagnosis of developmental delay (DD), mental retardation (MR), and/or autism spectrum disorder (ASD) without noted dysmorphic features and 485 were referred for a primary diagnosis other than DD, MR or ASD. In the first group, 129 had ASD as primary indication by the referring clinician, 373 had DD as primary indication, and most have not been formally assessed for ASDs. Among the second group of 485, major referral categories included 141 with a primary diagnosis of multiple congenital anomalies, 106 with dysmorphic features, 43 with seizures, and 41 with congenital heart disease. Of these 485, 51 had a secondary diagnosis of DD or MR and were therefore excluded from analysis, leaving 434 non ASD/DDIMR controls (Table 4). More detailed clinical information about cases with aberrations at 16 p11 was obtained by medical records review after approval by Children's Hospital Boston IRB.

### Array CGH and Analysis

[0231] AGILENT 244K human genome oligonucleotide CGH microarrays (G441 1B, AGILENT Technologies, Palo Alto, Calif.) were used for array CGH analysis at Children's Hospital Boston (Shen Y, et al., 2007, Clin Chem, 53(12)). Test samples labeled with Cy5 were compared to a reference sample labeled with Cy3 for standard two-color array CGH or vice-versa in reverse dye labeling setting. Images were captured by an AGILENT scanner and quantified using FEATURE EXTRACTION software v9.0. CGH analytic software v3.4 was subsequently used for data normalization, quality evaluation and data visualization. Copy number aberrations were indicated using the ADM-2 (Aberration Detection Method 2) algorithm.

### Multiplex Ligation-Dependent Probe Amplification (MLPA) and Fluorescent In Situ Hybridization (FISH) Design and Analysis

[0232] To independently confirm the deletion/duplication of 16p1 1.2 region, four pairs of MLPA target-probes were designed based on the unique sequences of four genes within this interval: SPN, MAZ, TAOK and TBX6. Additionally, four pairs of MLPA control probes were included, two pairs corresponding to unique sequences of SEPT1 and LAT genes located on chromosome 16 outside the deletion interval, and two pairs corresponding to unique sequences on other chromosomes. All probes were synthetic oligonucleotides. M LPA reagents were commercially available (M RC-Holland, Amsterdam, Netherlands), and reactions were performed according to the manufacturer's instructions. Final PCR products were analyzed on an ABI3730XL for peak identification and quantification. Copy number alterations were visually inspected by superimposing the peak profile of a test sample with the profile of a normal sample using SoftGenetics GENEMARKER software (SoftGenetics, LLC. State College, Pa.) as shown in FIG. 3C. For actual copy number quantification, the peak areas were exported to a Microsoft Excel worksheet. Peak area for each probe was normalized to the mean value for all control probes. The relative ratio of each peak was calculated by comparing between test sample and normal sample. Deletion was identified as relative ratio<0.75 and duplication as relative ratio>1.25.

[0233] FISH confirmation was performed as described previously 5 using BAC clone RP11-50412 as a probe specific to the 16p11.2 deletion interval.

### DECODE™ Iceland Samples

[0234] Searching for sequence variants affecting the risk of autism was done through a population study of autistic individuals ascertained through the State Diagnostic Counseling Center and the Department of Child and Adolescent Psychiatry in Iceland. We have investigated 299 cases and for 90% of them the parents or caregivers of each affected individual were queried using the Autism Diagnostic Interview-Revised (ADI-R 2) (Table 4). The rest of the group (10%) is comprised of older individuals diagnosed according to the ICD-9 (WHO 1978) criteria for autism. For this study, all ICD-9 diagnoses were converted by clinical specialists to ICD-10 diagnoses (World Health Organization. The ICD-10 Classification of Mental and Behavioural Disorders. Diagnostic criteria for research. Geneva 1993). The diagnostic evaluation also included cognitive/developmental assessment, medical work-up and consultation with child and adolescent psychiatrist and/or developmental pediatrician.

[0235] All sample and data collection connected to the project, and relevant control samples, has been conducted by a licensed patient recruitment center (PRC). The PRC is a separate, not-for-profit trust company that serves as a link between study participants and researchers. This is where encryption of all research material takes place. The PRC is staffed with experienced nurses who work closely with the clinicians in the recruitment process using the same approach. The DNA samples were isolated from whole blood by conventional methods.

[0236] All participants, cases and controls, returned signed informed consents prior to participation in the study. All personal identifiers associated with medical information, questionnaire results, and blood samples were encrypted according to the standards set by the Data Protection Committee of Iceland (Gulcher J R, et. al., 2000, Eur J Hum Genet, 8:73942). All procedures related to this study have been approved by the Data Protection Authority and National Bioethics Committee of Iceland.

### Genotyping and Analysis

[0237] A total of 24,258 Icelandic individuals were genotyped at DECODE™ Genetics for 317,503 SNPs using the SENTRIX® HumanHap300 BeadChip (ILLUMINA®). Deletions and duplications at 16p11 were detected using a Hidden Markov Model applied to the SNPs normalized intensity data (similar to the approach described in Colella S, et. al., 2007, Nucleic Acids Res; 35(6):2013-25).

### Statistical Methods

[0238] The Fisher's Exact Test was used to compare carrier frequency between cases and controls.

### Replication

[0239] Children's CGH sample was identified in advance as part of collaborative work supported by the Autism Consortium. DECODE™ Genetics researchers (RF, ES, HS, KS) contacted MJD after presentation of preliminary results at recent scientific meeting with offer to replicate this finding. We know of no additional replication attempts at this time.

[0240] These novel methods have good power to detect deletions spanning at least 10 probes (approximately 30 kb) on the AFFYMETRIX® 5.0 platform. We screened AGRE samples only from persons without known chromosomal anomalies, the fragile X syndrome, and other established syndromes.

[0241] The study was approved by the institutional review boards at the Massachusetts Institute of Technology (for the AGRE samples) and Children's Hospital Boston (for the Children's Hospital samples) and by the Data Protection Authority and National Bioethics Committee of Iceland (for the DECODE™ samples). Written informed consent was obtained from all subjects in the AGRE and DECODE™ research studies. Children's Hospital Boston carried out comparative genomic hybridization for clinical diagnostic purposes; since results were anonymous and obtained by chart review, research-based informed consent was not required by the institutional review board that approved the study.

### Results

### Copy-Number Abnormalities

[0242] To discover recurrent deletions or duplications conferring a risk of autism in multiple families, we used the COPPER algorithm to identify regions in which three or more patients with autism had overlapping copy-number (or genomic “dosage”) abnormalities—that is, we looked for regions that had either fewer than or more than two genomic copies. To ensure that these regions were not sites of common copy-number polymorphism, we focused on regions that were variant in less than 1% of parents of subjects with autism. For each event predicted by COPPER and meeting these criteria, we used visual inspection of intensity data, whether the same event was predicted with Birdseye, and analysis of mendelian inheritance to assess our confidence in the observation.

[0243] We identified 32 high-confidence regions and 15 lower-confidence regions, and all but 1 of these regions appeared to be normally segregating variants. Of these regions, 16 (including 8 with high confidence) had at least one de novo event in which both parents were negative for the copy-number variant, suggesting the possibility of recurrent mutation. Although the majority of these variants did not cosegregate with autism (and probably constitute rare, neutral copy-number variations), one region stood out as having multiple de novo events and no inherited events.

### Microdeletion on Chromosome 16p11.2

[0244] A region on chromosome 16p11.2 (from genomic coordinates 29.5 Mb to 30.1 Mb) was unique in our data. Five children (four boys and one girl) with autism in four independent families carried de novo deletions; we observed no deletions in the parents. One pair of siblings who were not monozygous twins shared the de novo event, presumably inherited from a parent with germ-line mosaicism. In the children with autism, we observed that the 16p11.2 deletion occurred on chromosomes derived from both the mother and the father.

[0245] The region coincides perfectly with a segment of 593 kb flanked by a 147-kb segmental duplication with 99.5% sequence identity. The identification of this cluster of de novo events by COPPER was confirmed by analysis of the same data with the use of Birdseye, with perfect agreement in identification of five samples with this deletion (FIGS. 3A and 3B). In addition, three of these samples overlapped with subjects who were genotyped at Johns Hopkins with AFFYMETRIX® 500K chips in an autism sample (provided by the National Institute of Mental Health), where the same deletions were identified by CNAT 4.0 (AFFYMETRIX®*). The size of these deletions (593 kb, containing 86 distinct sites with SNP or copy-number probes) generates confidence that this observation is genuine, with all five subjects having a logarithm of the odds (LOD) of more than 50 in favor of a dosage of 1 (i.e., a hemizygous deletion) (Table 6). We did not observe the deletion in the parents of these five children (LOD >50 in favor of a normal dosage of 2 in all parents), nor did we observe it in any of the 1420 parents in this study.

[0246] Deletion and normal dosage were positively confirmed by multiplex ligation-dependent probe amplification (MLPA) for all subjects in all four of these AGRE families (FIG. 3C). However, in 2814 samples from other studies (unpublished data), three female control subjects (who participated in a study of bipolar disorder but were not screened for autism) carried the deletion. The deletion rate in this population is much lower than the rate in the sample of children with autism (P=0.03 for the deletion), although it suggests that the deletion does not cause severe autism in every case.

Duplication in Families with Autism

[0247] We observed reciprocal duplication of the 593-kb deleted region in three AGRE families (with at least one family member with a LOD >30) (FIG. 3). This duplication was inherited in two families: it was transmitted from a parent to two of two affected offspring (male and female) as well as to one unaffected daughter and from another parent to four of four affected sons. In the third family, the duplication appeared to be a de novo event in one of two affected male offspring. The full duplication was not observed in any of the 2814 samples from other studies analyzed and thus appears to be a high-penetrance risk factor conferring risk to seven additional subjects with autism in the AGRE sample (P=1.1×10⁻⁴ for both deletions and duplications) (Table 4 and Table 6).

### Additional Duplications in AGRE Families

[0248] We identified five large duplications of three different sizes in the 15q11-13 region associated with the Prader-Willi and Angelman syndromes (Table 5). Of these duplications, one was maternally inherited, one occurred in a subject whose father had a normal dosage and whose mother was unobserved, and three were de novo duplications; the smallest extended from genomic position 23 Mb to 25 Mb on chromosome 15. This relatively small duplication could help to focus candidate-gene studies since it included only two genes—ATP10A and GABRB3.

[0249] We did not observe de novo deletion or duplication of a recently implicated gene, NRXN1 on chromosome 2 (Szatmari P, et al. 2007, Nat Genet, 39:319-328; Kim H-G, et al. 2008, Am J Hum Genet, 82:199-207) although we observed six families with deletions within the NRXN1 locus. The deletions did not cosegregate with autism in four of the six families (i.e., not all affected persons inherited the deletion) and were not associated with autism on the basis of a transmission disequilibrium test. We observed deletions at this locus in 5 of the 2814 control samples. Other events coincident with regions that were highlighted in two recent studies (Szatmari P, et al. supra; Sebat J, et al. 2007, Science, 316:445-449) are listed in Table 7.

[0250] To obtain a more complete tally of potentially causal recurrent events, we used the Birdseye algorithm to search for de novo deletions and duplications of 20 kb or larger in genomewide data obtained from the AGRE samples. We found no additional de novo events in multiple subjects that were not observed in the International HapMap Project or in 2814 samples from control subjects. Although we detected approximately 50 de novo events of more than 100 kb that were not seen in HapMap, a number of these events did not cosegregate with autism in other families or they have been observed in samples from subjects who did not have autism; all such events require further study in additional subjects and much larger control samples before those that may confer susceptibility can be identified.

### Confirmation in Clinical Samples

[0251] We tested for replication of the association between the 16p11.2 microdeletion and autism in a sample of 512 children with developmental delay, mental retardation, or autism spectrum disorder who were identified independently at Children's Hospital Boston with the use of comparative genomic hybridization. We identified five additional 16p11.2 deletions (all in boys, including one pair of monozygotic twins); the boundaries of the deletion in each case were identical to that described above (FIG. 3 and Table 8). One deletion was inherited from a mother with mild mental retardation, and the rest were de novo.

[0252] By contrast, we observed no deletions of this region in samples from 434 patients at Children's Hospital Boston that were tested by comparative genomic hybridization in the same laboratory. Samples from these children were submitted for diagnostic testing because they had dysmorphic features, multiple congenital anomalies, congenital heart disease, seizures, or other phenotypes in which developmental delay, mental retardation, or autism spectrum disorder was not indicated by the ordering physician.

[0253] The duplication at 16p11.2 was also observed in four independent samples (two from boys and two from girls) from the 512 children who were tested with the use of array comparative genomic hybridization for developmental delay, mental retardation, or autism spectrum disorder; the duplication was not observed in any of the 434 children who were tested for other diagnoses. This finding significantly reinforces the association of dosage abnormalities at 16p11.2 and phenotypes associated with autism spectrum disorder and developmental delay (P=0.007 for both deletions and duplications) (Table 9). Clinical features are described in Table 9. All deletions and duplications in this sample were positively confirmed with the use of MLPA and fluorescence in situ hybridization (FISH) (FIG. 3C and data not shown).

### Replication in an Icelandic Sample

[0254] We observed that 3 of 299 subjects with autism spectrum disorder from Iceland carried the 16p11.2 deletion, a finding that was consistent with the 1% frequency observed in children at Children's Hospital Boston who had sporadic developmental delay or autism spectrum disorder (Table 10). One of these deletions was de novo, the origin of the second deletion was not known, and one was inherited from a father who had attention deficit-hyperactivity disorder (ADHD). By contrast, in a control sample of 18,834 subjects who did not undergo screening for a psychiatric or language disorder, only two deletions were observed—in other words, the deletion was observed more often in patients with autism by a factor of 100 (P=3.7×10⁻⁵). However, in a study of the same population by investigators at DECODE™ Genetics, this deletion was observed at a markedly increased rate in subjects with a psychiatric or language disorder. This study showed that the deletion was present in 1 of 648 patients with schizophrenia, 1 of 420 patients with bipolar disorder, 1 of 203 patients with ADHD (the father of a child with autism, as noted above), and 1 of 3000 patients with panic disorder, anxiety, depression, or addiction. In addition, 1 of 748 patients with dyslexia carried the deletion. Overall, in the Icelandic samples, the carrier frequency among patients with autism was 1%; the frequency was approximately 0.1% among patients with a psychiatric or language disorder and 0.01% in the general population.

[0255] We did not observe the duplication of this region in any of the Icelandic subjects with autism spectrum disorder but did observe it in two subjects with bipolar disorder and five unscreened control subjects, with a carrier frequency of 0.04% in subjects with a psychiatric or language disorder and in 0.03% of the general population.

[0256] In total, we have observed the identical deletion of nearly 600 kb in 13 subjects with autism (10 confirmed de novo mutations, 2 confirmed inherited mutations from parents with ADHD or mental retardation, and 1 mutation of unknown inheritance), with the reciprocal duplication of the same region documented in 11 additional subjects.

[0257] We identified regions of rare copy-number variation in families with autism and observed an association between a microdeletion on chromosome 16 (and the inherited reciprocal duplication) and autism. Both the deletion and the duplication are likely to be mediated by the 147-kb segmental duplication flanking the deleted or duplicated sequence.

### Example 3

[0258] Recurrent microdeletion or microduplication events are a common cause of developmental delay and mental retardation(Shaw-Smith C, et al., 2004, J Med Genet., 41(4):241-8; Schoumans J, et al., 2005, J Med Genet, 42(9):699-705). Most of these events are mediated by recombination between segmentally duplicated sequences through an established mechanism of non-allelic homologous recombination, or NAHR (Lupski JR. 1998, Trends Genet; 14(10):417-22). Microdeletion or microduplication through intrachromosomal recombination between segmentally duplicated sequences is an established mechanism associated with congenital developmental disorders such as the Smith-Magenis syndrome, the Williams syndrome, the Potocki-Lupski syndrome (17p1 1.2 duplication), and the DiGeorge syndrome (22q11 deletion). The goal of this study is aimed at discovering microdeletion or microduplication that are associated with autism.

### Materials and Methods

### Children's Hospital Boston Samples

[0259] We performed whole genome high resolution oligonucleotide array CGH on 1,445 consecutively submitted clinical samples with referring diagnoses including developmental delay (DD; n=639), mental retardation (MR) or learning disability (LD; n=49 for MR/LD), autism spectrum disorder (ASD; n=177) or pervasive developmental disorder (PDD; n=85; total for ASD/PDD=262), multiple congenital anomalies (n=118), dysmorphic features (n=224), seizures (n=49) or undefined/other phenotypes (n=104). All patients with 15q13 imbalance were examined by a developmental specialist and a clinical geneticist. A team of specialists from Clinical Genetics, Neurology, and Developmental Medicine at Children's Hospital Boston conducted a medical record review approved by the Children's Hospital Boston Institutional Review Board (IRB).

### Array CGH and Confirmatory Studies

[0260] CGH was performed according to previously published methods of analysis using the AGILENT 244K human genome oligonucleotide CGH microarray; all coordinates reflect human genome build 18 (G4411B, AGILENT Technologies, Palo Alto, Calif.) (Shen Y, et al., 2007, Clin Chem., 53:2051-9). Independent confirmation of deletion/duplication of the 15q13.2q13.3 region was performed by multiplex ligation-dependent probe amplification (MLPA) and fluorescence in situ hybridisation (FISH) according to previously described methods (Shen Y, et al., supra).

### AGRE Samples

[0261] DNA samples from 751 multiplex families were obtained from the Autism Genetic Resource Exchange (AGRE) collection of multiplex families (Geschwind DH, et al., 2001, Am J Hum Genet., 69:463-6) using previously described sample selection criteria (Weiss L A, et al., 2008, N Engl J. Me., 358:667-75). Our final dataset included 1,441 individuals affected with autism spectrum disorders, 1,420 parents, and 132 unaffected/unknown siblings. This study was approved by the Massachusetts Institute of Technology (MIT) IRB.

### Genotyping and Confirmatory Studies

[0262] AGRE samples were genotyped on AFFYMETRIX® 5.0 arrays at the Genetic Analysis Platform of the Broad Institute, and analyzed for copy number variants with the COPPER and Birdseye algorithms (Weiss L A, et al., 2008, N Engl J. Me., 358:667-75; Korn J M, et. al., Submitted 2008). SNP genotype data and raw intensity files have been released to AGRE, and are available to the research community under AGRE guidelines. Independent confirmation of deletion/duplication of the 15q13.2q13.3 region among AGRE samples was performed using AGILENT 244k array CGH and MLPA at Children's Hospital Boston.

### Methods for MLPA

[0263] Independent confirmation of deletion/duplication of the 15q13.2q13.3 region was performed using four pairs of multiplex ligation-dependent probe amplification (MLPA) probes based on unique sequences of four genes within this interval: MTMR15, TRPM1, OTUD7A and CHRNA 7. The assay included seven pairs of MLPA control probes, three pairs corresponding to unique sequences of TJP1, CHRFAM7A and RYR3 genes located on chromosome 15 outside the deletion interval, and four pairs corresponding to unique sequences on other chromosomes. All probes were synthetic oligonucleotides. MLPA reagents were commercially available (MRC-Holland, Amsterdam, Netherlands), and reactions were performed according to the manufacturer's instructions.

### Results

[0264] We identified ten patients with genomic imbalance at chromosome 15q13.2q13.3, including five with BP4-BP5 microdeletions from the CHB cohort (chrl5:28.7 Mb to ˜30.3 Mb; hgl8). We did not find any cases of BP4-BP5 microdeletion among 1,420 parents, and 132 unaffected/unknown siblings in the AGRE samples. We identified three patients with reciprocal BP4-BP5 duplications; and two siblings with a smaller duplication of ˜500 kb within BP4-BP5 (chr15:28.9-29.4 Mb; hgl8; FIG. 4). BP4 is more than 1 Mb distal to the telomeric breakpoint (BP3) of the 15q11q13 deletion associated with PWS/AS and the reciprocal duplication that has been associated with autism. None of the patients from CHB or AGRE had other clinically significant copy number variants elsewhere in the genome. All CHB patients had normal karyotypes and fragile X testing by Southern blot and PCR. All deletion and duplication events in these samples were confirmed by dye reversal array CGH (FIG. 4) and through a customized FISH or MLPA assay (data not shown and FIG. 5). Genomic coordinates of the deletions and duplications associated with autism are listed in Table 11.

[0265] In general, cognitive performance of patients with 15q13.2q13.3 microdeletion/microduplication was variable. Test scores ranged from moderate MR to the normal range. Although some patients had full-scale IQ in the normal range, they all had some degree of language impairment and/or learning disability. Expressive language was consistently more delayed than receptive language. Many of these individuals showed capacity for ongoing improvement in academic and social skills. Neurobehavioral symptoms were very common in microdeletion/microduplication patients. All had difficulties with social interactions. Overall, dysmorphic features were mild (data not shown), and the neurobehavioral symptoms were the most significant cause of disability among these patients.

### 15q13.2q13.3 Microdeletion Patient

[0266] Clinical features of the one individual (patient 3) from the CHB cohort with 15q13.2q13.3 BP4-BP5 deletions are presented in Table 11. All have subtle dysmorphology findings based on examination by a clinical geneticist. Cognitive testing was performed on the individual. Patient 3 showed significant nonverbal learning disability but has no history of developmental regression. There is mild impaired language skills. Profiles commonly included developmental or oro-motor dyspraxia with disarticulation.

[0267] Motor delays were not prominent, especially compared to cognitive and behavioral issues, but were observed among in patient 3 with BP4-BP5 deletion. Patient 3 had hypotonia that resolved over time. Patient 3 with BP4-BP5 deletion had exam findings that is not consistent with cerebral palsy.

[0268] Patient 3 with BP4-BP5 deletion has a diagnosis of an autism spectrum disorder. Autistic features such as variably poor eye contact and other difficulties with social interactions. Beyond concerns about autistic features, patient 3 has ADHD, bipolar disorder, and anxiety disorder but have no problem sleeping at night.

### 15q13.2q13.3 Microduplication Patients

[0269] Clinical features of four individuals from the CHB and AGRE cohorts with 15q13.2q13.3 BP4-BP5 duplications are presented in Table 11. They have a diagnosis of autism. Patients 6 and 8 also have severe expressive language delay, but language testing results were not available on Patients 9 and 10. Patient 6 has a history of anxiety spectrum disorder/obsessive-compulsive disorder in addition to autism. Cognitive and behavioral test results are not available for duplication patients from the AGRE cohort, although Patient 8's Vineland Score suggests he would fall in the range of mental retardation. Clinical examination of Patient 6 did not suggest a consistent pattern of dysmorphology and neither had a history of seizures. Patients 8-10 (AGRE cohort) were not available for exam.

[0270] Patient 6 (CHB cohort) and Patient 8 (AGRE cohort) have a de novo duplication and an autism diagnosis. Patients 9 and 10 (AGRE cohort) are siblings with autism and a smaller duplication nested within BP4-BP5 inherited from their apparently unaffected mother.

### Clinical Information for 15q13.2q13.3 BP4BP5 Microdeletion Cases

### Patient 3

[0271] Patient 3 is a 10 year 9 month Asian male with bipolar disorder, ADHD, generalized anxiety disorder, and a nonverbal learning disability. He has required medication with Depakote, Risperdal, and Cogentin.

[0272] He scored in the normal range of IQ. His Wechsler Intelligence Scale for Children-Fourth Edition (WISC-IV) scores were Verbal Comprehension 93 (32nd percentile), Perceptual Reasoning 90 (25th percentile), Working Memory 77 (6th percentile) and Processing Speed 93 (34th percentile), Full Scale IQ is 86 (18th percentile). His receptive language is mildly to moderately impaired while his expressive language is moderately impaired. Executive functions were compromised based on the Behavior Rating Inventory of Executive Function Global Executive Composite score of 87 (99th percentile).

[0273] He has particular difficulty with executive functions and has weak social skills. His play skills are particularly immature. He has difficulty reading social cues and interacting with other children. Behavioral problems include impulsivity, aggression, and anxiety. He has significant learning disabilities, attentional problems, and psychiatric symptoms, but not cognitive developmental delay. He has not had an ADOS.

[0274] Mild dysmorphic facial features include a slightly long midface, upslanting palpebral fissures, epicanthal folds, broad nasal root, and posteriorly rotated ears. Extremity exam is notable for tapering fingers, fifth finger clinodactyly, hyperextensible elbows, and pes planus. There were no neurocutaneous lesions. Neurological exam revealed only mild diffuse hypotonia with normal strength and deep tendon reflexes.

### Patient 6

[0275] Patient 6 is a 20y/o Caucasian male with BP4-BP5 duplication and a diagnosis of autism, moderate mental retardation, and obsessive-compulsive disorder. His receptive language is moderately to severely impaired while expressive language is severely impaired. He is nonverbal, uses only a few signs, and uses keyboard and other communication aid with speech therapy. He has a history of repetitive behaviors (hand flapping; swinging; spinning) and poor eye contact. His social interactions are significantly impaired, and he has difficulty with transitions.

[0276] Dysmorphology exam revealed small midface and apparent frontal bossing due to the large cranium with deep set eyes. He is also significant for severe dental crowding and supernumerary teeth. He has a very tall narrow palate; narrow palpebral fissures, and hyperpigmetned macules on the penis which has led to a diagnosis of Bannayan-Riley-Ruvalcaba syndrome. Gene sequencing for PTEN was normal in clinical and research laboratories. At age 2-11/12, axial hypotonia noted, but tone was recorded as normal by age 7y1m (at that time, noted to have tight heel cords). As a teenager, poorly cooperative for a neurological exam, but apparently nonfocal with a normal gait. He has no history of seizures and has not had an EEG other than a sleep study performed at age 7 which did not mention any abnormal EEG. He had a head CT at 6 months due to macrocephaly and an MRI at age 1y that were both read as normal.

### Patient 8

[0277] Patient 8 from the AGRE repository is an 8y male (mix of Caucasian and Africa American) with a de novo BP4-BP5 duplication and a diagnosis of autism based on the Autism Diagnostic Interview-Revised (ADI-R). This child had significant delays in expressive language with a performance level equivalent to 1y4m at chronolofical age 7y7m on the Vineland Adaptive Behavior Scales. This child had one sibling with autism who did not have the BP4-BP5 duplication. No additional phenotypic information was available.

### Patients 9 and 10

[0278] Patient 9 and 10 from the AGRE repository are Caucasian male siblings with a maternally inherited duplication of 502 kb (Chr15: 28902339-29404603; hgl 8; MTMR15, Interview-Revised (ADI-R). The mother who carries the sarne duplication is apparently unaffected. No additional phenotypic information was available.

[0279] The phenotype of chromosome 15q13.2q1 3.3 BP4-BP5 microdeletion/duplication syndrome can include features of autism spectrum disorder. Recognition of this broader phenotype has implications for clinical diagnostic testing and efforts to understand the underlying etiology of this syndrome.

TABLE 1
Genomic imbalance identified in clinical samples by oligonucleotide-array CGH and
confirmed with alternative methods.

| | Cytogenetics (FISH/karyotype), MLPA, whole-genome | |
|---|---|---|
| Genomic imbalance detected by focused oligonucleotide- | CGH/targeted PCR | |
| array CGH | Confirmation | |
| (A) Associated with disorders | | |
| 13qter gain, 20.7 Mb; 18qter loss, 5.6 Mb (partial | 46, XX, add(18)(q2?1.3) ish | Consistent |
| trisomy 13q and partial monosomy 18q) | der(18)t(13; 18)(D13S327+, 18qtel11−) | |
| 18pter-p11.21 loss, 13.4 Mb; 18p11.21 gain, 1.3 Mb (partial | 46, XX ish 18pter(D18S552 X 1), 18p11.21 (RP11- | Consistent |
| monosomy 18p and partial trisomy 18p) | 720L3 X 3) | |
| 17p11.2 loss, 3.6 Mb (Smith-Magenis syndrome) | 46, XX, ish del(17)(p11.2 p11.2) | Consistent |
| 1p36.21 loss, 1.8 Mb (1p36 deletion syndrome) | 46, XY, ish del(1)(p36.2) | Consistent |
| 4q35.2 loss, 1.1 Mb (autism spectrum disorder) | 46, XY, ish del(4)(qter−) | Consistent |
| X gain (aneusomy X) | 47, XXY | Consistent |
| Y gain (aneusomy Y) | 47, XYY | Consistent |
| Yp11.2 loss, 2.7 Mb: 2 cases | ish Yp11.2 (RP11-115H13 X 0) | Consistent |
| 2q13 loss, 100 kb (NPHP1 deletion): 2 cases | Confirmed by whole-genome array CGH | Consistent |
| 17p13 loss, 23 kb (CARKL and CTNS deletion; | Confirmed by whole-genome array CGH, MLPA, | Consistent |
| familial) | parental array CGH, and PCR flanking the deletion | |
| (B) Likely clinically relevant | | |
| 17p11.2 gain, 3.3 Mb | 46, XY, nuc ish 17p11.2 (RP11-363P3 X 3) | Consistent |
| 16p11.2 loss, 546 kb (de novo): 2 cases | 46, XY, ish del(16)(p11.2 p11.2) | Consistent |
| 15q13.3 gain, 1.5 Mb | nuc ish 15q13.3 (RP11-303I13 X 3) | Consistent |
| 5q22.1-q23.1 loss, 8.5 Mb | Confirmed by whole-genome array CGH | Consistent |

TABLE 2
Genomic Coverage with Oligo Array CGH (CHB Version 1.0)

| OMIM # | Region | Gene(s) | Associated Conditions |
|---|---|---|---|
| n/a | 41 sites | multiple | Subtelomeric del/dup for all chromosome arms |
| n/a | 43 sites | multiple | Marker chromosomes that contain a centromere |
| n/a | Aneuploidy | multiple | Aneuploidy for chromosomes 13, 18, 21, X, and Y |
| 253280 | 1p34.1 | POMGnT1 | Muscle-Eye-Brain disease |
| 607872 | 1p36 | DVL1 | Monosomy 1p36 |
| | 1q41-42.12 | multiple | Possible Congenital Diaphragmatic Hernia Locus |
| | 2p21 | SIX3 | Holoprosencephaly 2 |
| 164280 | 2p24.1 | MYCN | Feingold syndrome |
| 256100 | 2q13 del | NPHP1 | Nephronophthisis 1/Joubert 4 |
| | 2q22-23 | multiple | 2q22-23 del syndrome |
| 606708 | 2q31.1 | DLX1/DLX2 | Split-hand/foot malformation 5 |
| 186000 | 2q31.1 | HOXD13 | Synpolydactyly/Syndactyly I |
| 600430 | 2q37 | GPR35 | Albright hereditary osteodystrophy-like brachydactyly |
| 605934 | 2q37.1-37.3 | HPE6 | Holoprosencephaly 6 |
| 110100 | 3q22 | FOXL2 | Blepharophimosis, Ptosis, Epicanthus Inversus (BPES) |
| 220200 | 3q24 del | ZIC1 ZIC4 | Dandy-Walker malformation |
| 605289 | 3q28 del | TP73L | Split-hand/foot malformation 4 |
| | 3q29 del | PAK2, DLG1 | 3q29 del syndrome |
| 194190 | 4p16 del | WHS | Wolf-Hirschhorn syndrome |
| 180500 | 4q25 del | PITX2 | Rieger syndrome, Type 1 |
| | 4q32 del | | 4q32 del with autism |
| 122470 | 5p13.1 del | NIPBL | Cornelia de Lange syndrome |
| 123450 | 5p15.2 del | multiple | Cri-du-chat syndrome |
| 175100 | 5q22 del | APC | Familial adenomatous polyposis (FAP) |
| 117550 | 5q35.2-35.3 del | NSD1 | Sotos syndrome |
| 119600 | 6p21.1 del | RUNX2 | Cleidocranial dysplasia |
| 176270 | 6q16.3 del | SIM1 | Prader-willi-like syndrome |
| 175700 | 7p13-14.1 | GLI3 | Greig cephalosyndactyly |
| 101400 | 7p21.1 del | TWIST1 | Saethre-Chotzen syndrome |
| 194050 | 7q11.23 del | ELN | Williams-Beuren syndrome |
| 194050 | 7q11.23 dup | | Split-hand/foot malformation 1 |
| 142945 | 7q36.3 del | SHH | Holoprosencephaly 3 |
| | 8p22-p23.1 | dup/del | 8p22 del/dup syndrome |
| 222400 | 8p23.1 del | | Congenital Diaphragmatic Hernia 2 |
| 214800 | 8q12 del | CHD7 | CHARGE syndrome |
| 113650 | 8q13.3 del | EYA1 | Branchio-oto-renal syndrome (BOR) |
| 150230 | 8q24 del | TRPS1, EXT1 | TRPS, type 2 (Langer-Giedion) |
| 190350 | 8q24.12 del | TRPS1 | Trichorhinophalangeal syndrome, type 1 |
| 109400 | 9q22.3 del | PTCH | Basal cell nevus syndrome (Gorlin syndrome) |
| 161200 | 9q33.3 del | LMX1B | Nail-patella syndrome |
| 191100 | 9q34 del | TSC1 | Tuberous Sclerosis 1 |
| 236670 | 9q34.1 del | POMT1 | Walker/Warburg Syndrome |
| 610253 | 9q34.3 del | EHMT1 | 9q34.3 del syndrome |
| 601362 | 10p14 del | DGSII | DiGeorge syndrome/VCFS, region 2 |
| 146255 | 10p14 del | GATA3 | Hypoparathyroidsim, SNHL, and renal dysplasia |
| 600095 | 10q24.3 dup | DAC | Split hand/split foot syndrome 3 |
| 601224 | 11p11.2 del | EXT2, ALX4 | Potocki-Shaffer syndrome |
| 106210 | 11p13 del | PAX6 | Aniridia type 2 |
| 194072 | 11p13 del | WT1/PAX6 | WAGR |
| 194070 | 11p13 del | WT1 | Wilm's Tumor 1 |
| 130650 | 11p15.5 dup/del | IGF2 | Beckwith-Wiedemann |
| 161015 | 11q13.2 | NDUFV1 | Leukodystrophy and myoclonic epilepsy |
| 147791 | 11q23 del | multiple | Jacobsen syndrome |
| 601803 | 12p tetrasomy | | Pallister-Killian |
| 163950 | 12q24.1 del | PTPN11 | Noonan syndrome |
| 180200 | 13q14 del | RB1 | Retinoblastoma/MR |
| 609637 | 13q32 del | ZIC2 | Holoprosencephaly 5 |
| 105830 | 15q12 | UBE3A | Angelman syndrome |
| 176270 | 15q11.2 | SNRPN | Prader-Willi syndrome |
| | 15q11.2q13 | maternal dup | Autism |
| | 15q21 del | | 15q21 del syndrome |
| 142340 | 15q26.1 del | NR2F2 | Diaphragmatic hernia 1 |
| 601313 | 16p13.3 | PKD1 | Polycystic kidney disease (dominant form) |
| 180849 | 16p13.3 | CREBBP | Rubinstein/Taybi |
| 191100 | 16p13.3 | TSC2 | Tuberous Sclerosis 2 |
| | 17p11.2 | | dup(17)(p11.2p11.2) syndrome |
| 182290 | 17p11.2 del | RAI1 | Smith-Magenis syndrome |
| 118220 | 17p12 dup | PMP22 | Charcot-Marie-Tooth-1A |
| 162500 | 17p12 del | PMP22 | HNPP |
| 247200 | 17p13.3 del | LIS1 | Miller-Dieker syndrome |
| 162200 | 17q11.2 del | NF1 | Neurofibromatosis 1 |
| 114290 | 17q24.3 del | SOX9 | Campomeilc dysplasia |
| 142946 | 18p11.3 del | TGIF | Holoprosencephaly 4 |
| 118450 | 20p12.2 del | JAG1 | Alagille |
| 190685 | 21q22 dup | DSCR1-4 | Down syndrome critical region |
| 236100 | 21q22.3 | TMEM1 | Holoprosencephaly 1 |
| 188400 | 22q11.2 del | TBX1 | DiGeorge syndrome/VCFS, region I |
| 602054 | 22q11.2 dup | TBX1 | dup(22)(q11.2q11.2) syndrome |
| 101000 | 22q12.2 del | NF2 | Neurofibromatosis 2 |
| 250100 | 22q13.31-qter | ARSA | 22q13.3 del syndrome (Angelman-like) |
| 115470 | inv dup(22)(q11.2) | | Cat Eye syndrome |
| 307030 | Xp21 del | GK | Glycerol kinase deficiency |
| 300473 | Xp21.2 del | NROB1 | Adrenal hypoplasia congenita |
| | Xp21.2 dup | NROB1 | Dosage sensitive sex reversal |
| 300300 | Xp22.1 del | BTK | Bruton agammaglobulinemia |
| 308700 | Xp22.3 del | KAL1 | Kallman |
| 309801 | Xp22.3 del | HCCS | Microphthalmia with linear skin defects |
| 308100 | Xp22.3 del | ARSC1 | Steroid sulfatase deficiency |
| 300495 | Xp22.32 del | NLGN4 | Autism, X-linked, region 2 |
| 127300 | Xp22.33/Yp11.32 | SHOX | Leri-Weill dyschondrosteosis |
| 312080 | Xq21 dup/del | PLP | Pelizaeus-Merzbacher disease |
| 300067 | Xq23 del | DCX | X-linked lissencephaly |
| 306955 | Xq26.2 | ZIC3 | X-linked heterotaxy |
| 300123 | Xq27.1 del.dup | SOX3 | X-linked mental retardation |
| 312750 | Xq28 del | MECP2 | Rett |
| 300017 | Xq28 del | FLNA | PNH, frontometaphyseal dysplasia, otopalatodigital |
| 480000 | Yp11.31 del | TDF | Y chromosome |
| 415000 | Yq11 del | AZF a, b, and c | Y chromosome |

TABLE 3
Genomic imbalance (GI) detected in validation samples
and comparison between oligo array results and alternate methods of detection

| | | | BAC array | | | |
|---|---|---|---|---|---|---|
| GI size | | Oligo array CGH | CGH | Cytogenetics (FISH/Karyotype) | MLPA | Comparison |
| 2.4 | Mb | 1p36.3 gain (0-2.4 Mb) | 1p36.3 gain | nuc ish 1p36.3(RP4-740C4x3, RP11- | n/a | Consistent |
| | | | | 547D24x4) | | |
| 500 | kb | 1q32.1-32.2.gain (20.1 Mb-20.6 Mb) | 1q32.3 gain | ish dup(1)(q32.3q32.3) (RP11- | n/a | Consistent |
| | | | | 224F8+) | | |
| 4.3 | Mb | 2q22.3-(145.6 Mb-149.9 Mb) | 2q22.3 loss | ish del(2)(q22.3q22.3)(RP11-89L3−) | n/a | Consistent |
| 4.2 | Mb | 2q37.2 loss (238.2 Mb-242.4 Mb) | 2q37.2 loss | 46, XX, del (2)(q37.2).ish | 2qter loss- | Consistent |
| | | | | del(q37.2q37.2) | subtel | |
| 1.6 | Mb | 2q37.3 loss (241.1 Mb-242.7 Mb) | 2q37.3 loss | 46, XY, ish del(2)(q37.3q37.3)(RP11- | 2qter loss- | Consistent |
| | | | | 367H1−) | subtel | |
| 1.6 | Mb | 2q37.3 loss (241.1 Mb-242.7 Mb) | 2q37.3 loss | ish del(2)(q37.3q37.3)(RP11-367H1−) | n/a | Consistent |
| 54.7 | Mb; | 3q24-q29 gain (144.7 Mb-199.4 Mb); | 3q24-q29 | 46, XY, add(18)(p11.32) | 3q gain- | Consistent |
| | | | gain; | | | |
| 4.8 | Mb | 18p11.32 loss (0.43 Mb-5.3 Mb) | 18p11.32 | | subtel; 18p | |
| | | | loss | | loss-subtel | |
| 3.6 | Mb | 4p16.3 loss (0-3.6 Mb) | 4p16.3 loss | 46, XY, del(4)(p16.3).ish | 4pter deletion | Consistent |
| | | | | del(p16.3p16.3) | | |
| 200 | kb | 4q22.3 gain (98.9 Mb-99.1 Mb) | 4q22.3 gain | ish dup(4)(q22.3q22.3)(RP11- | n/a | Consistent |
| | | | | 369I16+) | | |
| 700 | kb | 4q35.2 (188.8 Mb-189.5 Mb) | 4q35.2 loss | ish del(4)(q35.2q35.2)(RP11-565A3−) | n/a | Consistent |
| 1.3 | Mb; | 5p15.33 gain (0-1.3 Mb); 7q36.3 | 5p15.3 gain; | ish | 5p15.3 gain- | Consistent |
| 3.7 | Mb | loss (153 Mb-156.7 Mb) | 7q36 loss | der(7)t(5; 7)(p15.3; q36)(5ptel+, SHH−) | subtel; 7q36 | |
| | | | | | loss-subtel | |
| 1.9 | Mb | 6p24.1 gain (12.7 Mb-14.6 Mb) | 6q24.1 gain | ish dup(6)(q24.1q24.1)(RP3- | n/a | Consistent |
| | | | | 468K18+) | | |
| 7.3 | Mb | 6q24.1-24.3 loss (140.7 Mb-148 Mb) | 6q24.1 loss | ish del(6)(q24.1q24.1)(RP3-468K18−) | n/a | Consistent |
| 4.1 | Mb | 6q26 loss (166 Mb-170.1 Mb) | 6q26 loss | 46, XX, del(6)(q26) | 6qter loss- | Consistent |
| | | | | | subtel | |
| 12 | Mb | 7q11.22 loss (61.9 Mb-73.9 Mb) | n/a | n/a | 7q11.23 loss- | Consistent |
| | | | | | WBS | |
| 1.4 | Mb | 7q11.22 loss (72.1 Mb-73.5 Mb) | n/a | n/a | 7q11.23 loss- | Consistent |
| | | | | | WBS | |
| Aneuploidy | | 8 gain, 21 gain, 13qter gain | n/a | Trisomy 8, trisomy 21, trisomy 13q | n/a | Consistent |
| 7.1 | Mb; | 8p23.2-8pter loss (0.181-7.3 Mb); | n/a | n/a | 8p loss- | Consistent |
| 4 | Mb | 8q24.3-8qter gain (142 Mb-146 Mb) | | | subtel; 8q | |
| | | | | | gain-subtel | |
| 17.3 | Mb | 8q21.11-21.3 loss (75.3 Mb-92.6 Mb) | 8q21.1 loss | ish del(8)(q21.1q21.1)(RP11-90B7−) | n/a | Consistent |
| 320 | kb | 9p24.3 gain (0.09 Mb-0.41 Mb) | 9p24.3 gain | ish dup(9)(pter)(GS-43N6+) | n/a | Consistent |
| 100 | kb | 9q34.3 loss (13.7 Mb-13.8 Mb) | n/a | n/a | 9q loss-subtel | Consistent |
| 500 | kb | 10q26.3 loss (131.6 Mb-132.1 Mb) | 10q26.3 loss | ish del(10)(q26.3q26.3)(RP11-435P9−) | n/a | Consistent |
| 300 | kb | 11p13 loss (3.2 Mb-3.5 Mb) | n/a | n/a | 11p13 loss | Consistent |
| 2.3 | Mb | 15q11-12 gain (20.3 Mb-22.6 Mb) | n/a | n/a | 15q11-13 | Consistent |
| | | | | | gain-Autism | |
| 11 | Mb | 15q11-13 gain (19.1 Mb-30.1 Mb) | n/a | n/a | 15q11-13 | Consistent |
| | | | | | gain | |
| | | | | | PWS/AS | |
| 6.6 | Mb | 15q11-13 gain (20.4 Mb-27 Mb) | n/a | n/a | 15q11-13 | Consistent |
| | | | | | gain- | |
| | | | | | PWS/AS | |
| 300 | kb | 15q11-13 loss (20.3 Mb-20.6 Mb) | n/a | n/a | 15q11-13 | Consistent |
| | | | | | loss-PWS/AS | |
| 5.7 | Mb | 15q11-13 loss (20.4 Mb-26.1 Mb) | n/a | n/a | 15q11-13 | Consistent |
| | | | | | loss-PWS/AS | |
| 800 | kb | 16p11.2 loss (34 Mb-34.8 Mb) | 16p11.2 loss | ish del(16)(p11.2p11.2)(RP11- | n/a | Consistent |
| | | | | 244B22−) | | |
| 200 | kb | 16p13.12 loss (13.9 MB-14.1 Mb) | n/a | n/a | 16p loss- | Consistent |
| | | | | | ERCC4 gene | |
| 300 | kb | 16q24.2 loss (87.8 Mb-88.1 Mb) | 16q24.3 loss | ish del(16)(q24.3q24.3)(RP11- | n/a | Consistent |
| | | | | 104N10dim) | | |
| 2.3 | Mb | 16q24.3 gain (86 Mb-88.3 Mb) | 16q24.3 gain | ish der(9)t(9; 16)(q34.3; q24.3)(RP11- | 16qter gain- | Consistent |
| | | | | 21B21+, RP11-104N10+, RP11- | subtel | |
| | | | | 566K11+) | | |
| 3.6 | Mb | 17p11.2 loss (16.5 Mb-20.1 Mb) | 17p11.2 loss | ish del(17)(p11.2p11.2)(SMS−) | n/a | Consistent |
| 2.7 | Mb | 17p13.2 loss (2.2 Mb-4.9 Mb) | 17p13.2 loss | ish del(17)(p13.2p13.2)(LIS1−) | n/a | Consistent |
| 298 | kb | 17p13.3 gain (0.084 Mb-0.382 Mb) | n/a | n/a | 17p gain- | Consistent |
| | | | | | subtel | |
| 1.5 | Mb | 18q21.1 loss (44.5 Mb-46 Mb) | n/a | n/a | 18q loss | Consistent |
| 2.5 | Mb | 19p13.12 loss (13.8 Mb-16.3 Mb) | 19p13.1 loss | ish del(19)(p13.1p13.1)(RP11- | n/a | Consistent |
| | | | | 56K21−) | | |
| 11 | Mb | 20p12.3 loss (64.9 Mb-75.9 Mb) | 20p12.3 loss | ish del(20)(p12.3p12.3)(RP11- | n/a | Consistent |
| | | | | 116E13−) | | |
| 44 | kb | 20pter loss (0-0.044 Mb) | 20p13 loss | ish del(20)(p13p13)(RP11-530N10−) | n/a | Consistent |
| 2.9 | Mb | 22q11.21 gain (17.2 Mb-20.1 Mb) | n/a | n/a | 22q11.2 gain- | Consistent |
| | | | | | VCFS/DGCR | |
| 2.9 | Mb | 22q11.21 gain (17.2 Mb-20.1 Mb) | n/a | n/a | 22q11.2 gain- | Consistent |
| | | | | | VCFS/DGCR | |
| 2.4 | Mb | 22q11.21 loss (16.7 Mb-19.1 Mb) | 22q11.2 loss | ish del(22)(q11.2q11.2)(RP11- | n/a | Consistent |
| | | | | 316L10−) | | |
| 2.5 | Mb | 22q11.21 loss (17.2 MB-19.7 Mb) | n/a | n/a | 22q11.2 loss- | Consistent |
| | | | | | VCFS/DGCR | |
| 2.9 | Mb | 22q11.21 loss (17.2 Mb-20.1 Mb) | n/a | n/a | 22q11.2 loss- | Consistent |
| | | | | | VCFS/DGCR | |
| 2.9 | Mb | 22q11.21 loss (17.2 Mb-20.1 Mb) | n/a | n/a | 22q11.2 loss- | Consistent |
| | | | | | VCFS/DGCR | |
| 2.9 | Mb | 22q11.21 loss (17.2 Mb-20.1 Mb) | n/a | n/a | 22q11.2 loss- | Consistent |
| | | | | | VCFS/DGCR | |
| 2.9 | Mb | 22q11.21 loss (17.2 Mb-20.1 Mb) | n/a | n/a | 22q11.2 loss- | Consistent |
| | | | | | VCFS/DGCR | |
| 200 | kb | 22q13.33 gain (49.2 Mb-49.4 Mb) | n/a | n/a | 22q13.33 | Consistent |
| | | | | | gain-ARSA | |
| Aneuploidy | | X gain | n/a | 47, XXY | n/a | Consistent |
| 1.5 | Mb | Xp22.31 loss (6.5 Mb-8 Mb) | Xp22.31 loss | ish del(X)(p22.3p22.3)(STS−) | n/a | Consistent |
| 600 | kb | Xp22.32 loss (5.2 Mb-5.8 Mb) | Xp22.32 loss | ish del(X)(p22.3p22.3)(RP11- | n/a | Consistent |
| | | | | 323G19−) | | |

Size for genomic imbalance indicates minimum.
Abbreviations:
ARSA = Arylsulfatase A gene locus associated with atypical Angelman syndrome;
AS = Angelman syndrome;
DGCR = Di George syndrome critical region;
PWS = Prader-willi syndrome;
WBS = Williams-Beuren syndrome

TABLE 4
Detection of 16p11.2 Copy-Number Variants, According to Sample.*

| | Case | Control | | | Case | | | Control | | |
|---|---|---|---|---|---|---|---|---|---|---|
| Sample | Subjects | Subjects | Experiment | Analysis | Deletion | Duplication | number | Deletion | Duplication | P Value† |
| AGRE | 751 Families, | 1420 AGRE | Affymetrix | COPPER | 5 | 7 | | 3 | 2 | 1.1 × 10⁻⁴ |
| | with 1441 | parents and | 5.0 for | and | | | | | | |
| | case | 2814 samples | AGRE | Burdseye | | | | | | |
| | subjects‡ | with bipolar | families, | for AGRE | | | | | | |
| | | disorder or | Affymetrix | families, | | | | | | |
| | | NIMH control | 500K for | COPPER | | | | | | |
| | | | controls | for | | | | | | |
| | | | | controls | | | | | | |
| Children's | 512 Children | 434 Children | Agilent | ADM-2 | 5 [symbol] | 4 | | 0 | 0 | 7.1 × 10⁻³ |
| Hospital | | | comparative | | | | | | | |
| Boston∫∫ | | | genomic | | | | | | | |
| | | | hybridization | | | | | | | |
| deCode | 299 Subjects | 18,834 Subjects | Illumina | HMM | 3 | 0 | | 2 | 5 | 4.2 × 10⁻⁴ |
| | with autism | not screened | Human- | | | | | | | |
| | spectrum | for a psychiatric | Hap300 | | | | | | | |
| | disorder\|\| | or language | BeadChip | | | | | | | |
| | | disorder | | | | | | | | |

*ADM denotes aberration detection method, AGRE Autism Genetic Resource Exchange, COPPER copy-number polymorphism evaluation routine, HMM hidden Markov model, and NIMH National Institute of Mental Health.
†P Values for deletions plus duplications are for the comparison between case subjects and control subjects, as calculate by Fisher's exact test.
‡Subjects were assessed according to the Autism Diagnostic Interview - Revised (for details, see the Supplementary Appendix).
∫∫Case subjects had received the diagnosis of developmental delay, mental retardation, or autism spectrum disorder after clinical evaluation. Control subjects had been referred for congenital anomalies not including developmental delay, mental retardation, or autism spectrum disorder. [symbol]
The number includes a monozygotic twin pair.
||The diagnosis of autism spectrum disorder was made according to the definition in the International Classification of Diseases, 10^{th} revision.

TABLE 5
Duplication of Chromosome 15q11-13 in the AGRE Sample.*

| Chromosome and Region | |
|---|---|
| Chromosome 15 | Inheritance and Transmission |
| 21.2-26.3 (BP2-BP3) | 2 De novo copy-number variants |
| 18.8-26.4 (BP1-BP3) | Inherited copy-number variant, 2 transmitted |
| | and 0 not transmitted; 1 unknown |
| 23.3-24.7 | De novo copy-number variant |

*Duplications of the region associated with the Prader-Willi and Angelman syndromes were detected by applying novel algorithms to Affymetrix 5.0 genotype data. For inherited events, listed are the number of transmitted copy-number variants and the number of copy-number variants that were not transmitted to affected offspring for whom data were available. AGRE denotes Autism Genetic Resource Exchange.

TABLE 6
Phenotypic Date in AGRE families and Iceland probands with copy number variants at 16p1 1.2. Family Structure and ADI-R and ADOS
subscores, as well as performance measures are given for AGRE families and Iceland probands with copy number variants at 16p1 1.2

| | | | | | | | | | | ADI-R | | |
|---|---|---|---|---|---|---|---|---|---|---|---|---|
| | | | | | | | | | ADI-R | Commu- | | |
| | | | | | | | | | Commu- | nication - | | |
| | | | | | Scored | | Age at | ADI-R | nication - | Non- | ADI-R | ADI-R |
| | Father | Mother | | Deletion/ | Affected | ADOS | ADI-R | Social | Verbal | Verbal | Behavior | Development |
| ID | ID | ID | Gender | Duplication | Status | Diagnosis | Exam | Total | Total | Total | Total | Total |
| AU002901 | 0 | 0 | Female | Duplication | | | | | | | | |
| AU002902 | 0 | 0 | Male | | | | | | | | | |
| AU002903 | 2 | 1 | Male | Duplication | Autism | Spectrum | 13.07 | 28 | | | | |
| AU002904 | 2 | 1 | Female | Duplication | | | | | 16 | | 6 | 4 |
| AU002905 | 2 | 1 | Female | Duplication | Autism | Autism | 9.84 | 27 | 17 | | 8 | 3 |
| AU011001 | 9 | 8 | Female | | | | | | | | | |
| AU011002 | 0 | 0 | Male | | | | | | | | | |
| AU011003 | 2 | 1 | Male | | | | | | | | | |
| AU011004 | 2 | 1 | Male | Duplication | Autism | Autism | 7.95 | 26 | 15 | | 7 | 5 |
| AU011005 | 2 | 1 | Male | | Autism | Autism | 5.76 | 27 | 17 | | 4 | 5 |
| AU0154201 | 0 | 0 | Male | | | | | | | | | |
| AU0154202 | 0 | 0 | Female | | | | | | | | | |
| AU0154301 | 201 | 202 | Female | | | | | | | | | |
| AU0154302 | 201 | 202 | Male | Deletion | Autism | Autism | 14.73 | 28 | | 12 | 4 | 5 |
| AU0154303 | 201 | 202 | Female | Deletion | Autism | Autism | 12.85 | 30 | | 14 | 4 | 5 |
| AU029801 | 0 | 0 | Female | | | | | | | | | |
| AU029802 | 0 | 0 | Male | | | | | | | | | |
| AU029803 | 2 | 1 | Male | Deletion | Autism | | 4.79 | 16 | 14 | | 3 | 3 |
| AU029804 | 2 | 1 | Male | | Autism | | 2.95 | 25 | 18 | | 5 | 3 |
| AU032701 | 0 | 0 | Female | | | | | | | | | |
| AU032702 | 0 | 0 | Male | Duplication | | | | | | | | |
| AU032703 | 2 | 1 | Female | | | | | | | | | |
| AU032704 | 2 | 1 | Male | Duplication | Autism | Autism | 9.99 | 28 | 18 | | 4 | 5 |
| AU032705 | 2 | 1 | Male | Duplication | Autism | Autism | 8.36 | 28 | 23 | | 8 | 5 |
| AU032706 | 2 | 1 | Male | Duplication | Autism | Autism | 6.86 | 27 | 18 | | 4 | 5 |
| AU032707 | 2 | 1 | Male | Duplication | Autism | Autism | 10.55 | 26 | 24 | | 8 | 5 |
| AU041901 | 0 | 0 | Female | | | | | | | | | |
| AU041902 | 0 | 0 | Male | | | | | | | | | |
| AU041903 | 2 | 1 | Female | | | | | | | | | |
| AU041904 | 2 | 1 | Male | | Autism | Autism | 7.56 | 28 | | 14 | 6 | 5 |
| AU041905 | 2 | 1 | Male | Deletion | Autism | Autism | 5.92 | 15 | | | 6 | 5 |
| AU0938201 | 0 | 0 | Male | | | | | | | | | |
| AU0938202 | 0 | 0 | Female | | | | | | | | | |
| AU0938301 | 201 | 202 | Male | Deletion | Autism | Autism | 9.32 | 18 | 12 | | 6 | 5 |
| AU0938302 | 201 | 202 | Male | | Autism | Autism | 7.43 | 16 | 13 | | 4 | 5 |

Iceland Samples

| | | | | | | | | | | | |
|---|---|---|---|---|---|---|---|---|---|---|---|
| Aut1 | Adoptee | Adoptee | Female | Deletion | Autism | Autism | 18.33 | 10 | 10 | 4 | 1 |
| | 1a | 1b | | | | | | | | | |
| Aut2 | ADHD | 2b | Male | Deletion | Autism | Autism | 10.58 | 14 | 9 | 7 | 3 |
| | 2a | | | | | | | | | | |
| Aut3 | 3a | 3b | Female | Deletion | Autism | N/A | N/A | N/A | N/A | N/A | N/A |

| | | | | | | | | | Peabody | | | | |
|---|---|---|---|---|---|---|---|---|---|---|---|---|---|
| | | | | | | | | Age at | Picture | | | | |
| | | | | | ADOS | | | Peabody | Vocab- | | | | |
| | | | ADOS | | Commu- | | | Picture | ulary | | Raven | | |
| | Age at | | Commu- | ADOS | nication + | ADOS | ADOS | Vocab- | Test | | Non- | Age at | Vine- |
| | ADOS | ADOS | nication | Social | Social | Play | Behavior | ulary | Estimated | Age at | verbal | Vine- | land |
| ID | Exam | Module | Total | Total | Total | Total | Total | Test | Age | Raven | IQ | land | Score |
| AU002901 | 15.46 | 4 | 3 | 4 | 7 | 1 | 2 | 15 | >22 yrs | 15 | 94 | 16.2 | 6 yrs |
| | | | | | | | | | | | | | 8 mos |
| AU002902 | 11.94 | 3 | 6 | 12 | 18 | 2 | 0 | 11 | 10 yrs | 11 | 90 | 12.68 | 9 yrs |
| | | | | | | | | | 9 mos | | | | 5 mos |
| AU002903 | | | | | | | | | | | | | |
| AU002904 | | | | | | | | | | | | | |
| AU002905 | | | | | | | | | | | | | |
| AU011001 | | | | | | | | | | | | | |
| AU011002 | | | | | | | | | | | | | |
| AU011003 | | | | | | | | | | | | | |
| AU011004 | 11.09 | 3 | 3 | 8 | 11 | 0 | 3 | | | 11 | 110 | | |
| AU011005 | 8.9 | 3 | 6 | 12 | 18 | 2 | 2 | | | 8 | 136 | | |
| AU0154201 | | | | | | | | | | | | | |
| AU0154202 | | | | | | | | | | | | | |
| AU0154301 | | | | | | | | | | | | | |
| AU0154302 | 14.73 | 1 | 4 | 9 | 13 | 2 | 4 | 14 | | 14 | 70 | | |
| AU0154303 | 12.92 | 1 | 5 | 12 | 17 | 4 | 0 | 12 | | 12 | | | |
| AU029801 | | | | | | | | | | | | | |
| AU029802 | | | | | | | | | | | | | |
| AU029803 | | | | | | | | | | | | | |
| AU029804 | | | | | | | | | | | | | |
| AU032701 | | | | | | | | | | | | | |
| AU032702 | | | | | | | | | | | | | |
| AU032703 | | | | | | | | | | | | | |
| AU032704 | 14.82 | 3 | 4 | 7 | 11 | 0 | 1 | 14 | 14 yrs | 14 | 75 | | |
| | | | | | | | | | 9 mos | | | | |
| AU032705 | 13.19 | 2 | 5 | 8 | 13 | 1 | 5 | 13 | 7 yrs | 13 | 50 | | |
| | | | | | | | | | 2 mos | | | | |
| AU032706 | 11.68 | 3 | 3 | 7 | 10 | 0 | 0 | 11 | 14 yrs | 11 | 107 | | |
| | | | | | | | | | 9 mos | | | | |
| AU032707 | 10.55 | 3 | 6 | 13 | 19 | 1 | 1 | 10 | 9 yrs | 10 | 107 | | |
| | | | | | | | | | 3 mos | | | | |
| AU041901 | | | | | | | | | | | | | |
| AU041902 | | | | | | | | | | | | | |
| AU041903 | | | | | | | | | | | | | |
| AU041904 | 9.65 | 1 | 6 | 8 | 14 | 1 | 5 | 9 | 4 yrs | 9 | 78 | | |
| | | | | | | | | | 1 mo | | | | |
| AU041905 | 7.96 | 3 | 5 | 10 | 15 | 1 | 4 | 7 | 5 yrs | 7 | 108 | | |
| | | | | | | | | | 6 mos | | | | |
| AU0938201 | | | | | | | | | | | | | |
| AU0938202 | | | | | | | | | | | | | |
| AU0938301 | 9.32 | 3 | 3 | 7 | 10 | 1 | 3 | 9 | 6 yrs | 9 | 80 | | |
| | | | | | | | | | 5 mos | | | | |
| AU0938302 | 7.43 | 3 | 5 | 9 | 14 | 1 | 3 | 7 | 4 yrs | 7 | 70 | | |
| | | | | | | | | | 10 mos | | | | |

Iceland Samples

| | | | | | | | | WISC- | WISC- | WISC- | WISC- |
|---|---|---|---|---|---|---|---|---|---|---|---|
| | | | | | | | | 111 | 111 | 111 | 111 |
| | | | | | | | | Age | VIQ | PIQ | FS |
| Aut1 | 18.42 | 4 | 3 | 8 | 11 | 0 | 0 | 17.75 | 65 | 61 | 61 |
| Aut2 | 10.58 | 3 | 7 | 11 | 18 | 3 | 2 | 7.1 | 75 | 75 | 73 |
| Aut3 | N/A | N/A | N/A | N/A | N/A | N/A | N/A | N/A | N/A | N/A | N/A |

TABLE 7
Previously reported CNVs in autism.

| Event reported | | | Events observed | | | | |
|---|---|---|---|---|---|---|---|
| Chr | Mb | event | Chr | Mb | event | inheritance, transmission (T:U) | Reference |
| 1 | 143.8-144.9 | dup | 1 | 144.8-145.1 | del | inherited, 1:0 | 9 |
| | | | | 143.5-145.0 | del | de novo** | |
| | | | | 143.6-145 | dup | unknown, not shared by affected sib | |
| | | | | 143.5-145 | dup | inherited 1:2 | |
| 2 | 50.4-50.8 | del | 2 | ~50.4 | del | inherited, 1:1 (one add'l possible) | 9 |
| | | | | ~51 (varied) | | inherited, 11:9 | |
| 2 | 162.2-162.3 | del | none | | | NA | 10 |
| 2 | 236.4-249.4 | del | none | | | NA | 10 |
| | 238.2-242.7 | del | | | | | |
| 3 | 60.7-60.8 | del | 3 | 60.9-61.1 | del | parent, 0:4 | 10 |
| | 61.1-61.4 | dup | | 60.8-61.2 | dup | parent, 0:2 | |
| | | | | 60.8-60.9 | dup | parent, 0:1 | |
| 6 | 14.0-15.3 | del | none | | | NA | 10 |
| 7 | 15.2-15.3* | del | no additional events | | | NA | 10 |
| 10 | 50.6-61.5 | dup | none | | | NA | 10 |
| 13 | 44.2-46.1 | del | none | | | NA | 10 |
| 15 | 18.5-30.7 | dup | 15 | 21.2-26.3 | dup | 2 de novo | 10 |
| | | | | 18.8-26.4 | dup | inherited, 2:0; 1 unknown | |
| | | | | 23.3-24.7 | dup | de novo | |
| 16 | 5.99-6.20 | del | 16 | 6.03-6.06 | del | parent, 0:2 | 10 |
| | | | | 6.06-6.08 | del | inherited, 2:0 | |
| | | | | 6.06-6.19 | dup | inherited, 2:0 | |
| 16 | 29.6-31.1 | del | 16 | 29.5-30.0 | del | de novo (5 cases in 4 families) | 10 |
| | | | | 29.5-30.0 | dup | inherited, 7:0, 1 de novo | |
| | | | | 29.6-29.7 | dup | inherited, 1:1 | |
| 17 | 14.3-15.2 | del | 17 | 14.0-15.4 | del | inherited, 2:0 | 9 |
| | 14.3-15.2 | dup* | | | | | |
| 20 | 0.08-0.37 | del | 20 | 0.20-0.22 | del | parent, 0:1 | 10 |
| 20 | 2.8-3.9 | del | 20 | 3.72-3.74 | del | inherited, 1:1 | 10 |
| | | | | 2.9-3.0 | dup | inherited, 1:0 | |
| 22 | 17.5-19.8 | del | 22 | 19.2-19.8 | del | Unknown | 9 |
| | 17.5-20.3 | dup* | | 17.2-19.8 | dup | parents, 0:3 | |
| | | | | 16.1-16.3 | dup | inherited, 2:1 | |
| | | | | 17.3-18.7 | dup | unknown | |
| | | | | 19.0-19.8 | dup | inherited, 1:1 | |
| 22 | 45.1-49.5 | del | 22 | 45.60-45.65 | del | parent, 0:2 | 10 |
| | | | | 48.17-48.23 | del | inherited, 4:4 | |
| | | | | 48.14-48.18 | del | inherited, 2:0 | |
| | | | | 47.7-48.3 | dup | inherited 3:1 | |

Events featured in the main tables or text of recent studies evaluating copy number in autism.
For each reported event, we include events observed in our data with substantial overlap, and for inherited events, the number transmitted: not transmitted for affected offspring with data.
Our sample has some overlap with previously reported samples,
*indicates a reported event in an overlapping sample which we also detect.
**event not featured in the main text or tables of the paper, but listed in the table in an overlapping sample.

TABLE 8
Clinical information for Children's Hospital deletion cases (Pt#) and Iceland deletion cases
(Aut#). Clinical descriptive information is given for the 5 subjects in the Children's Hospital
Boston sample with deletions at 16p11.2, and the two subjects in the Iceland sample with deletions
at 16p11.2 and clinical data available. The third Iceland subject has a history of seizures, but no other
information available.
Physical characteristics of individuals with del(16)(p11.2)

| | Pt 1 | Pt 2 | Pt 3 | Pt 4 | Pt 5 | Aut 2 | Aut 1 |
|---|---|---|---|---|---|---|---|
| Gender | Male | Male | Male | Male | Male | Male | Female |
| History | | | | | | | |
| Speech delay | + | + | + | + | + | + | + |
| Motor delay | + | + | + | + | + | − | + |
| Poor eye contact | + | NA | NA | + | + | + | + |
| Tactile aversion | + | NA | NA | | | − | − |
| Self stim behavior | + | NA | NA | | | + | − |
| Age at walking | 18 m | 16 m | 17 m | 16 m | 16 m | 13 m | |
| Regression | − | − | − | − | − | − | − |
| Other | | | | | | ADHD, | ADHD |
| | | | | | | seizure | |
| Physical Exam | | | | | | | |
| Age at examination | 6 y 6 m | 2 y 9 m | 17 m | 9 y 2 m | 9 y 2 m | 10 y 6 m | 5 y 2 m |
| Height (% ile) | 108.1 cm | NA | 74.2 cm | 143.3 cm | 150 cm (>97^{th}) | 152 cm | 106 cm |
| | (<3^{rd}) | | (<3^{rd}) | (90^{th}) | | (95^{th}) | (25^{th)} |
| Weight (% ile) | 19 kg (10^{th}) | NA | 9 kg (<3^{rd}) | 65.4 kg | 71.9 kg (>97^{th}) | 69 kg | 18 kg |
| | | | | (>97^{th}) | | (>97^{th}) | (50^{th)} |
| OFC (% ile) | 51 cm (50^{th}) | 52 cm (90^{th}) | 48.5 cm | 54.5 cm (90^{th}) | 56 cm (>97^{th}) | 54 cm | 52.5 cm |
| | | | (75^{th}) | | | (60^{th}) | (90^{th}) |
| Facial | − | − | − | − | − | | |
| dysmorphism | | | | | | | |
| 2-3 toe syndactyly | + | − | − | − | − | | |

TABLE 9
Clinical information for Children's Hospital duplication
cases. Clinical descriptive information is given for the 4 subjects in the Children's
Hospital Boston sample with duplication at 16p11.2.
Physical characteristics of individuals with dup(16)(p11.2)

| | Pt 1 | Pt 2 | Pt 3 | Pt 4 |
|---|---|---|---|---|
| History | | | | |
| Gender | Male | Female | Male | Female |
| Speech delay | unknown | + (mild) | + | + |
| Motor delay | + | + | − | |
| Poor eye contact | NA | − | − | |
| Tactile aversion | NA | − | − | |
| Self stim behaviors | NA | − | − | |
| Age at walking | Not crawling or | NA | 16 m | 14 m |
| | walking yet | | | |
| Regression | − | − | − | − |
| Other | Agenesis of | | | Seizures |
| | corpus callosum | | | beginning age |
| | | | | 6 m; MR |
| Physical Exam | | | | |
| Age at examination | 14 m | 3 y3 m | 2 y6 m | 9 y9 m |
| Height (% ile) | NA | 97.2 cm (50-75^{th}) | 92.4 cm (50^{th}) | |
| Weight (% ile) | 11 kg (50^{th}) | 14.7 kg | 15.2 kg (90^{th}) | 33.5 kg (50^{th}) |
| | | (50-75^{th}) | | |
| OFC (% ile) | 80th | 46.5 cm | 51.25 cm (95^{th}) | 51 cm (25^{th}) |
| | | (<3^{rd}) | | |
| Facial | − | − | − | − |
| dysmorphism | | | | |
| Hypotonia | + (mild) | − | − | − |
| Other | | Mild spasticity; | | |
| | | Fifth finger | | |
| | | clinodactyly | | |
| Laboratory testing | | | | |
| Karyotype | NA | NA | 46, XY, dup(16) | NA |
| | | | (q11.2q12.1) | |
| Fragile X | NA | NA | NA | NA |

NA = not assessed

TABLE 10
Iceland phenotype information. Clinical diagnosis by ICD-10 category
and transmission information is listed for the Icelandic
autism samples with deletions at 16p11.2.

| Alias ICE | ICD-10 | Sex | Age | Transmission |
|---|---|---|---|---|
| | Autism, mild | | | |
| Aut1 | MR | F | 22 | No info on parents |
| | Atypical | | | |
| Aut2 | Autism | M | 12 | Transmitted from father |
| Aut 3 | Asperger's | F | 37 | de novo |
| | unspecified | | | |
| | MR, epilepsy | | | |

TABLE 11
15q13.2q13.3 microduplications and microdeletions in individuals with autism.

| | Patient 6 | Patient 3 | Patient 8 | Patient 9 | Patient 10 |
|---|---|---|---|---|---|
| Genetics | | | | | |
| Cohort | CHB | CHB | AGRE | AGRE | AGRE |
| Referring | Autism | Autistic Spectrum | Autism | Autism | Autism |
| Diagnosis | | | | | |
| size | 1.98 Mb Duplication | 1.70 Mb Deletion | 1.93 Mb Duplication | 0.50 Mb Duplication | 0.50 Mb Duplication |
| Coordinates | 28,719,136-30,701,432 | 28,709,202-30,405,675 | 28,719,136-30,648,918 | 28,902,339-29,404,603 | 28,902,339-29,404,603 |
| (hg18) | | | | | |
| Origin | de novo | Unknown (adopted) | de novo | Maternal | Maternal |
| LCR involved | BP4-BP5 | BP4-BP5 | BP4-BP5 | Internal to BP4-BP5 | Internal to BP4-BP5 |
| Age and Gender | 20 y Male | 10 y 9 m Male | 8 y Male | Male | Male |
| Cognitive/ | | | | | |
| Behavioral | | | | | |
| Development | | | | | |
| Developmental | Yes | Yes | Yes | N/A | N/A |
| Delay | | | | | |
| Mental | Yes | No | Not tested | N/A | N/A |
| Retardation | | | | | |
| ASD | Yes | No | Yes, ADOS, ADI-R | Yes, ADI-R | Yes, ADI-R |
| Cognitive Testing | FSIQ below 50 | FSIQ = 86%; memory | N/A | N/A | N/A |
| | | 77; Verbal 93; | | | |
| | | WISC-IV | | | |
| Receptive | Severely impaired | Mildly impaired | Severely Impaired | N/A | N/A |
| Language | (follows simple | | | | |
| | commands | | | | |
| Expressive | Severely impaired | Mildly impaired | Severely Impaired | N/A | N/A |
| Language | (nonverbal) | | | | |
| Repetitive | Yes | No | N/A | N/A | N/A |
| behavior | | | | | |
| Poor eye contact | Yes; variable | Yes | N/A | N/A | N/A |
| Social | Impaired | Impaired | N/A | N/A | N/A |
| interactions | | | | | |
| Self-stimulatory | Yes | No | N/A | N/A | N/A |
| behaviors | | | | | |
| Self-injurious | Yes | Unkown | N/A | N/A | N/A |
| behaviors | | | | | |
| Behavioral issues | Yes | Yes | N/A | N/A | N/A |
| Age at Walking | 12 m | 18 m | N/A | N/A | N/A |
| History of | None | None | N/A | N/A | N/A |
| Seizures | | | | | |
| EEG | Normal | Normal | N/A | N/A | N/A |
| MRI | Normal | Not done | N/A | N/A | N/A |

TABLE 12

Multiplex ligation-dependent probe amplification (MLPA) probes for
identifying microduplications and microdeletions at
chromosome 15q13.2q13.3 BP4-BP5 and 16p11.2 loci.

| | | | | |
|---|---|---|---|---|
| | Ampli- | | | |
| Probe | con | | | Probe |
| name | size | Probe sequence (first half) | Probe sequence (second half) | type |

| | | | | |
|---|---|---|---|---|
| RYR3 | 92 | CCAGATCTCTGCGTCTGCAATTTTGTG | CTGGAACAGTCCCTATCTGTCAG | control |
| | | (SEQ. ID No 1) | (SEQ. ID No 2) | |
| CLN5-3 | 98 | CCAACTTGGCAACTGTACATTTCCC | CATCTCCGACCTGAAATGGATGCCCCTTTCT | control |
| | | (SEQ. ID No 3) | (SEQ. ID No 4) | |
| CHRNA7 | 100 | CAATGACTCGCAACCACTCACCGTCTACTTCTC | CCTGAGCCTCCTGCAGATCATGGAC | target |
| Ex2 | | (SEQ. ID No 5) | (SEQ. ID No 6) | |
| TJP1 | 104 | GACCAGCGGTCAGAGCCTTCTGATCATTCCAGG | CACTCGCCGCAGCAGCCAAGCAATCGCAG | control |
| | | (SEQ. ID No 7) | (SEQ. ID No 8) | |
| OTUD7A | 109 | CACAGCCAATCTGCCACATGTGTTCAATGAAGGGCGG | GGTCCCAAGCAGCCAGAGCGAGAGCCACAG | target |
| | | (SEQ. ID No 9) | (SEQ. ID No 10) | |
| GREM1 | 114 | GGTCACACTCAACTGCCCTGAACTAGAGCCAC | CTACCAAGAAGAAGAGAGTCACACGTGTGAAGCAGTGTCG | control |
| | | (SEQ. ID No 11) | (SEQ. ID No 12) | |
| Wnt5a6 | 117 | CTGATTCCTCCGTGTTGTGATGTGATGCTGGCCAC | GTTTCCAAACGGCAGCTCCACTGGGTCCCCTTTGGTTGTA | Control |
| | | (SEQ. ID No 13) | (SEQ. ID No 14) | |
| TRPM1 | 120 | GTGTTATCAGCCACGTAGGGGATGCCTTGAAAGACCACTCC | CAAGTCCAGAGGCCGGGTTTGTGCTATAGGAATTG | target |
| | | TC (SEQ. ID No 15) | (SEQ. ID No 16) | |
| MTMR15 | 126 | GGAGGTCAGGGACAGCTTTCAACAGTCCTGTTGGTCAA | CCTCGGCCGAATGGAGTTTCCTAGTTACACCATCAATCGGA | target |
| | | (SEQ. ID No 17) | AAACC (SEQ. ID No 18) | |
| CACAN2 | 129 | GGTGTCTGAAGACTACACACAGGTGAGTGAAAATTTTCTAC | AAGTAAGGATCTCAGAATGTGCTTGGGTCAGGGGGAACA | Control |
| D3EX30 | | CAGCTCC (SEQ. ID No 19) | (SEQ. ID No 20) | |
| CACAN2 | 134 | GTCATGGAATACCTTCACGTGCTTAGCCGGCCCAAAGTCAT | AGGAGCATGATGTGGTGTGGACCGAAGCTTACATTGACAGC | control |
| D3Ex13 | | CGACC (SEQ. ID No 221) | ACTGT (SEQ. ID No 22) | |
| SEPT1 | 92 | GCGACGGATGCTGGTGCAGACACA | CCTGCAGGACCTGAAAGAGGTGACGC | control |
| | | (SEQ. ID No 23) | (SEQ. ID No 24) | |
| SPN | 99 | GCTTCTCCTTCTCCTTGGGGTGCTGGTG | GTAAGCCCAGACGCTCTGGGGAGCACAAC | target |
| | | (SEQ. ID No 25) | (SEQ. ID No 26) | |
| MAZ | 104 | GACACGAGGAGAAAGTGCCATGTCACGTGT | GTGGCAAGATGCTGAGCTCGGCTTATATTTCG | target |
| | | (SEQ. ID No 27) | (SEQ. ID No 28) | |
| TAOK | 107 | GCTGGACAACCTGCACTACCGCAAGATGAAG | AAGATCCTGTTCCAAGAGGCACCCAACGGCCCTGG | target |
| | | (SEQ. ID No 31) | (SEQ. ID No 30) | |
| TBX6 | 114 | GTCAGTCACTGGCCTGGACCCCGAGGCCCGCTACTTGTTT | CTTCTGGATGTGATTCCGGTGGATGGGGCTCG | target |
| | | (SEQ. ID No 31) | (SEQ. ID No 32) | |
| LAT | 122 | CACTTCCTTTCAGGGTGGTGCTTCCTGACAGCACCCCGG | CCACTAGCACTGCTGCCCCATCAGCTCCTGCACTCAGCACC | control |
| | | (SEQ. ID No 33) | (SEQ. ID No 34) | |
| NCAM2 | 128 | GCCGCCAGCAATCTCAATGCCTCAGAAATCTTTTAATGCC | ACAGCAGAGAGAGGAGAAGAAATGACATTTTCCTGCAGGGC | Control |
| | | (SEQ. ID No 35) | CTCAG (SEQ. ID No 36) | |

What is claimed:

1. A method for diagnosing an autism spectrum disorder in a human individual or a human fetus, the method comprising determining whether or not the human individual or the human fetus carries an about a 500 kb long microdeletion that is flanked by an about 100 kb to about 147 kb long microduplication on a chromosome 16p11.2 region between 29.5 Mb and 31.1 Mb, wherein presence of the about 500 kb long microdeletion that is flanked by the about 100 kb to about 147 kb long microduplication on the chromosome 16p11.2 region between 29.5 Mb and 31.1 Mb is indicative of diagnosis of the autism spectrum disorder in the human individual or the human fetus.

2. The method of claim 1, wherein the microdeletion comprises SPN, MAZ, TAO K2, and TBX6 genes.

3. The method of claim 1, wherein the microduplication is about 147 kb long.

4. The method of claim 1, wherein the determination is performed using an oligonucleotide-based array comparative genomic hybridization (oligonucleotide-based CGH).

5. The method of claim 1, wherein the determination is performed using a bacterial artificial chromosome-based array comparative genomic hybridization (BAC-based CGH).

6. The method of claim 1, wherein the determination is performed using a fluorescence in situ hybridization (FISH).

7. The method of claim 1, wherein the determination is performed using a multiplex ligation-dependent probe amplification (MLPA).

8. A method for diagnosing an autism spectrum disorder in a human individual or a human fetus, the method comprising determining whether or not the human individual or the human fetus carries a between 500 kb and 2 Mb microduplication on chromosome 15q1 3.2q1 3.3 between a BP4 and a BP5 region, wherein presence of the between 500 kb and 2 Mb long microduplication on chromosome 15q13.2q13.3 between the BP4 and the BP5 region is indicative of diagnosis of the autism spectrum disorder in the human individual or the human fetus.

9. The method of claim 8, wherein the microduplication is about 500 kb long.

10. The method of claim 8, wherein the determination is performed using an oligonucleotide-based array comparative genomic hybridization (oligonucleotide-based CGH).

11. The method of claim 8, wherein the determination is performed using a bacterial artificial chromosome-based array comparative genomic hybridization (BAC-based CGH).

12. The method of claim 8, wherein the determination is performed using a fluorescence in situ hybridization (FISH).

13. The method of claim 8, wherein the determination is performed using a multiplex ligation-dependent probe amplification (MLPA).

14. A method for diagnosing an autism spectrum disorder in a human individual or a human fetus, the method comprising determining whether or not the human individual or the human fetus carries a between about 500 kb and about 2 Mb long microdeletion on chromosome 15q13.2q13.3, wherein presence of the between about 500 kb and about 2 Mb long microdeletion on chromosome 15q13.2q13.3 is indicative of diagnosis of the autism spectrum disorder in the human individual or the human fetus.

15. The method of claim 14, wherein the microdeletion on chromosome 15q13.2q13.3 is located between a BP4 and BP5 region of the chromosome 15q13.2q13.3.

16. The method of claim 14, wherein the microdeletion is about 500 kb long.

17. The method of claim 14, wherein the wherein the microdeletion comprises MTMR15, MTMR10, TRPM1, KLF13, OTUD7A, CHRNA7 and miRNA gene (hsa-mir-211). genes.

18. The method of claim 14, wherein the determination is performed using an oligonucleotide-based array comparative genomic hybridization (oligonucleotide-based CGH).

19. The method of claim 14, wherein the determination is performed using a bacterial artificial chromosome-based array comparative genomic hybridization (BAC-based CGH).

20. The method of claim 14, wherein the determination is performed using a fluorescence in situ hybridization (FISH).

The application's sequence listing, which the Patent Office published only in electronic form, follows.

SEQUENCE LISTING (53 sequences)

SEQ ID NO: 1 - DNA, 27 bp, Artificial Sequence
  Description of Artificial Sequence: Synthetic probe
ccagatctctgcgtctgcaattttgtg

SEQ ID NO: 2 - DNA, 23 bp, Artificial Sequence
  Description of Artificial Sequence: Synthetic probe
ctggaacagtccctatctgtcag

SEQ ID NO: 3 - DNA, 25 bp, Artificial Sequence
  Description of Artificial Sequence: Synthetic probe
ccaacttggcaactgtacatttccc

SEQ ID NO: 4 - DNA, 31 bp, Artificial Sequence
  Description of Artificial Sequence: Synthetic probe
catctccgacctgaaatggatgcccctttct

SEQ ID NO: 5 - DNA, 33 bp, Artificial Sequence
  Description of Artificial Sequence: Synthetic probe
caatgactcgcaaccactcaccgtctacttctc

SEQ ID NO: 6 - DNA, 25 bp, Artificial Sequence
  Description of Artificial Sequence: Synthetic probe
cctgagcctcctgcagatcatggac

SEQ ID NO: 7 - DNA, 33 bp, Artificial Sequence
  Description of Artificial Sequence: Synthetic probe
gaccagcggtcagagccttctgatcattccagg

SEQ ID NO: 8 - DNA, 29 bp, Artificial Sequence
  Description of Artificial Sequence: Synthetic probe
cactcgccgcagcagccaagcaatggcag

SEQ ID NO: 9 - DNA, 37 bp, Artificial Sequence
  Description of Artificial Sequence: Synthetic probe
cacagccaatctgccacatgtgttcaatgaagggcgg

SEQ ID NO: 10 - DNA, 30 bp, Artificial Sequence
  Description of Artificial Sequence: Synthetic probe
ggtcccaagcagccagagcgagagccacag

SEQ ID NO: 11 - DNA, 32 bp, Artificial Sequence
  Description of Artificial Sequence: Synthetic probe
ggtcacactcaactgccctgaactacagccac

SEQ ID NO: 12 - DNA, 40 bp, Artificial Sequence
  Description of Artificial Sequence: Synthetic probe
ctaccaagaagaagagagtcacacgtgtgaagcagtgtcg

SEQ ID NO: 13 - DNA, 35 bp, Artificial Sequence
  Description of Artificial Sequence: Synthetic probe
ctgattcctccgtgttgtgatgtgatgctggccac

SEQ ID NO: 14 - DNA, 40 bp, Artificial Sequence
  Description of Artificial Sequence: Synthetic probe
gtttccaaacggcagctccactgggtcccctttggttgta

SEQ ID NO: 15 - DNA, 43 bp, Artificial Sequence
  Description of Artificial Sequence: Synthetic probe
gtgttatcagccacgtaggggatgccttgaaagaccactcctc

SEQ ID NO: 16 - DNA, 35 bp, Artificial Sequence
  Description of Artificial Sequence: Synthetic probe
caagtccagaggccgggtttgtgctataggaattg

SEQ ID NO: 17 - DNA, 38 bp, Artificial Sequence
  Description of Artificial Sequence: Synthetic probe
ggaggtcagggacagctttcaacagtcctgttggtcaa

SEQ ID NO: 18 - DNA, 46 bp, Artificial Sequence
  Description of Artificial Sequence: Synthetic probe
cctcggccgaatggagtttcctagttacaccatcaatcggaaaacc

SEQ ID NO: 19 - DNA, 48 bp, Artificial Sequence
  Description of Artificial Sequence: Synthetic probe
ggtgtctgaagactacacacaggtgagtgaaaattttctaccagctcc

SEQ ID NO: 20 - DNA, 39 bp, Artificial Sequence
  Description of Artificial Sequence: Synthetic probe
aagtaaggatctcagaatgtgcttgggtcagggggaaca

SEQ ID NO: 21 - DNA, 46 bp, Artificial Sequence
  Description of Artificial Sequence: Synthetic probe
gtcatggaataccttcacgtgcttagccggcccaaagtcatcgacc

SEQ ID NO: 22 - DNA, 46 bp, Artificial Sequence
  Description of Artificial Sequence: Synthetic probe
aggagcatgatgtggtgtggaccgaagcttacattgacagcactgt

SEQ ID NO: 23 - DNA, 24 bp, Artificial Sequence
  Description of Artificial Sequence: Synthetic probe
gcgacggatgctggtgcagacaca

SEQ ID NO: 24 - DNA, 26 bp, Artificial Sequence
  Description of Artificial Sequence: Synthetic probe
cctgcaggacctgaaagaggtgacgc

SEQ ID NO: 25 - DNA, 28 bp, Artificial Sequence
  Description of Artificial Sequence: Synthetic probe
gcttctccttctccttggggtgctggtg

SEQ ID NO: 26 - DNA, 29 bp, Artificial Sequence
  Description of Artificial Sequence: Synthetic probe
gtaagcccagacgctctggggagcacaac

SEQ ID NO: 27 - DNA, 30 bp, Artificial Sequence
  Description of Artificial Sequence: Synthetic probe
gacacgaggagaaagtgccatgtcacgtgt

SEQ ID NO: 28 - DNA, 32 bp, Artificial Sequence
  Description of Artificial Sequence: Synthetic probe
gtggcaagatgctgagctcggcttatatttcg

SEQ ID NO: 29 - DNA, 31 bp, Artificial Sequence
  Description of Artificial Sequence: Synthetic probe
gctggacaacctgcagtaccgcaagatgaag

SEQ ID NO: 30 - DNA, 35 bp, Artificial Sequence
  Description of Artificial Sequence: Synthetic probe
aagatcctgttccaagaggcacccaacggccctgg

SEQ ID NO: 31 - DNA, 40 bp, Artificial Sequence
  Description of Artificial Sequence: Synthetic probe
gtcagtcactggcctggaccccgaggcccgctacttgttt

SEQ ID NO: 32 - DNA, 32 bp, Artificial Sequence
  Description of Artificial Sequence: Synthetic probe
cttctggatgtgattccggtggatggggctcg

SEQ ID NO: 33 - DNA, 39 bp, Artificial Sequence
  Description of Artificial Sequence: Synthetic probe
cacttcctttcagggtggtgcttcctgacagcaccccgg

SEQ ID NO: 34 - DNA, 41 bp, Artificial Sequence
  Description of Artificial Sequence: Synthetic probe
ccactagcactgctgccccatcagctcctgcactcagcacc

SEQ ID NO: 35 - DNA, 40 bp, Artificial Sequence
  Description of Artificial Sequence: Synthetic probe
gccgccagcaatctcaatgcctcagaaatcttttaatgcc

SEQ ID NO: 36 - DNA, 46 bp, Artificial Sequence
  Description of Artificial Sequence: Synthetic probe
acagcagagagaggagaagaaatgacattttcctgcagggcctcag

SEQ ID NO: 37 - DNA, 27 bp, Artificial Sequence
  Description of Artificial Sequence: Synthetic oligonucleotide
gttttcacactgggcgaagggaggact

SEQ ID NO: 38 - DNA, 29 bp, Artificial Sequence
  Description of Artificial Sequence: Synthetic oligonucleotide
cctgagctctgcctcttccagtaacattg

SEQ ID NO: 39 - DNA, 25 bp, Artificial Sequence
  Description of Artificial Sequence: Synthetic oligonucleotide
ccgaggatacgctttcttgtgatcc

SEQ ID NO: 40 - DNA, 27 bp, Artificial Sequence
  Description of Artificial Sequence: Synthetic oligonucleotide
gcagcagcgccattagcatcataaacc

SEQ ID NO: 41 - DNA, 22 bp, Artificial Sequence
  Description of Artificial Sequence: Synthetic oligonucleotide
caaccaagtttggactcggggt

SEQ ID NO: 42 - DNA, 25 bp, Artificial Sequence
  Description of Artificial Sequence: Synthetic oligonucleotide
cttctccatcgtcttcgacgtcgtc

SEQ ID NO: 43 - DNA, 7529 bp, Homo sapiens
cctctgagcccagccctccctagcatcaccacttccatcccattcctcagccaagagccaggaatcctgattccagatcccacgcttccctgcctccctcaggtgagccccagacccccaggcaccccgctggcccctgaaggagcaggtgatggtgctgtcttcgcccagcagctgtgggagcaggcgggtggggcaggatggaggggtgggtggggtgggtggagccagggcccacttcctttccccttggggccctgtccttcccagtcttgccccagcctcgggaggtggtggagtgacctggccccagtgctgcgtccttatcagccgagccggtaagagggtgagacttggtggggtaggggcctcagtgggcctgggaatgtgcctgtggcttgaaaagactctgacaggttatgatgggaagagattgggagccattgggctgcacagggtcagggaaggccaggaggggctggtcactgctggaatctaagctgctgaggctggagggagcctcaggatggggctgatgggggagctgccagcatctgttcctctgtcatttctgataacagtaaaagccagcatggaaaaaaccgttaaaccgcaggttgggcctggccgttggcagggaagtgggcagaggggaggcccggccaggtcctccggcaactcccgcgtgttctgcttctccggctgcccacctgcaggtcccagctcttgctcctgcctgtttgcctggaaatggccacgcttctccttctccttggggtgctggtggtaagcccagacgctctggggagcacaacagcagtgcagacacccacctccggagagcctttggtctctactagcgagcccctgagctcaaagatgtacaccacttcaataacaagtgaccctaaggccgacagcactggggaccagacctcagccctacctccctcaacttccatcaatgagggatcccctctttggacttccattggtgccagcactggttcccctttacctgagccaacaacctaccaggaagtttccatcaagatgtcatcagtgccccaggaaacccctcatgcaaccagtcatcctgctgttcccataacagcaaactctctaggatcccacaccgtgacaggtggaaccataacaacgaactctccagaaacctccagtaggaccagtggagcccctgttaccacggcagctagctctctggagacctccagaggcacctctggaccccctcttaccatggcaactgtctctctggagacttccaaaggcacctctggaccccctgttaccatggcaactgactctctggagacctccactgggaccactggaccccctgttaccatgacaactggctctctggagccctccagcggggccagtggaccccaggtctctagcgtaaaactatctacaatgatgtctccaacgacctccaccaacgcaagcactgtgcccttccggaacccagatgagaactcacgaggcatgctgccagtggctgtgcttgtggccctgctggcggtcatagtcctcgtggctctgctcctgctgtggcgccggcggcagaagcggcggactggggccctcgtgctgagcagaggcggcaagcgtaacggggtggtggacgcctgggctgggccagcccaggtccctgaggagggggccgtgacagtgaccgtgggagggtccgggggcgacaagggctctgggttccccgatggggaggggtctagccgtcggcccacgctcaccactttctttggcagacggaagtctcgccagggctccctggcgatggaggagctgaagtctgggtcaggccccagcctcaaaggggaggaggagccactggtggccagtgaggatggggctgtggacgccccagctcctgatgagcccgaagggggagacggggctgccccttaagtgtcggtgaatagtgaggctggaggccggaatctcagccagcctccagcaccttccctctcaccatcccactgccccctcgctcccatgtttccacccggcaccctgatcctcacccgaatctcctttttttttttcttttgagacagagtttcgctttgtcgcccaggctggagtgcaatgcacgatctcagttcactgcaacctctgcctcctaagttcaggcgattctcctgcctcagcttcccgagtaactgagattacaggcacccaccaccatgcccagctgcttttttgtatttttggtagagatggggtttcaccatgttggctaggctggtctcaaactcctgacctcaggtgatctacctgcctcagcctcccaaagtgctgagattacagacatgagcctccgcgccttgcctcctcacccacctcttcactctgaatcctcatgaggcttctcagccctggatttcctgctgccatcctcacccagcacccacaactagcgcctgggcagggcagggctggcacctctcaacgtctgtggactgaatgaataaaccctcctcatccacccctatttatctccatcaccatttccccctctttcttgttcctggaaacggctgctgagtctccatcggccaaacttatctgccctgtgatttctttgacaattctccttttcccccagaacccaccctgggttgaccagagtctgggaagaaggacaagagaacccggcaaactccctcctaggattaactttgtaaagcacccttgccctgtagctgcaagggctgtggaacctgggcagcccgcaaccacctttagctctgggccccccaggccagcctggagcatggctgggtggggccaccagcccatgctctcaggcgggcctgtgatctttcccagggcacatggactgtaggctggccctggcccacaccaccacactctccccagccatggacagaggcagccagaggcctcacggtttctcctccgagtttctggctgggtgtagttctcagaaaccccagtgcctgcgtgtgtccactcgtgggtgtggtttgtgtgcaagagctgaggatttggcgatgcttgggaggggtagttgtgggtacagacggtgtgggggtgggaagtggtgcagagactgaagagggtcaacctgggcatgggggacacagggactgctgagaacgtgcgtgtcatctttgctctgatggggtggacatagcagaaaatctaactctgtctgtagccccatacagaatgccagggtgagcacagtggctggtgcctttaatcccagcactttggaaagttgaggcaggaggatcgcttgagcccaggagttcgagtctgaagtgagctgtgattgcaccactgcacttcagcctgggcaacagagtgagcccctgtctcaaaaaagaaaagaaaaagaaagccaggcttcatggaaagatcgtatgtgtgacccaaatatgagttcttcagctcagccatggtaatcccttccttgaagtctccatttctgcagtacacatgcatgtgcgctctctctctctctctctctctcacacacacacacacacacacacacacacgcgcgcgcgcgcgcgctctcctgcgaacagaggcagggggagaggggtttgccctggtctcggggactggtctggctggcgcttccccactgcacgtttccaggtttagtttgtctgtgtctcctcttccatcccaggggctgagccccttccatcctccaagaggaaccagtgagagtgagtgaaggaggggcctggagccagggacttcccctgtggggcctgggtggagaggggagaactcaatggtgctgcctttgagaccagcccaggctacagcccaggagcacacatgggccagggcagttggtatttcccgaggacaaagaggaaattttcaaagaggaagttgttgagttagagcttgcggtggctgagagcagacaggttgacctgcaaaaaaagacaggggaggcatgtgagtgtgacagccctgctctgtggcctgggcaggagatgggggaaagggtcaggtgggggatgggctcgtgcagtgggagaggagacggagggagggagcgggaaggggcttgcttagtgggtgggaagagctgagctcggatggaaccagcttctaccagccaggctgggcacccactgggctgcatctggtggccttttctgattgctatttggactcactgcagctgcagaatgacagaggccatgtccaaaatcccttagagacactgttgtcttagagttgttaaaataagagcccccatatcaggtttagaaaatactgtcaccgaacgaacgtcgctgtcctcagctccacctccctttcctttgacagatatggttgttttctaagccaggactggttttagtcaggtcctgggcgaatcctgaaaaaaagaggtagtacgggtaaggaaggcacccaacagggctttcacaatccagaaaatatcaaaatataagtgttaaaagagaggcacaggccgggtgcggtggctcacgcctgtaatctcagcactttgggaggccaaggtgggcagatcatgaggtcaggagtttgagaccagcctggccaatatgatgaaaccccgtttctactaaaaatacaaaagttagccaggcatggtggtgtgctcctgtaatcccagctacttaggaggctgaggccagagaattgcttgaaccctggagtcagaggttgcagtgagccgggatcatgccactgtactccaggctgggtgacaaagtgagactgtctcaaaaaataaaaataaataaaataaataaaagagaggcacaaacagtgttatgaatgcaccaaggaaaatggtgcattcataactctcaggtgaagcctaccaagccatgcgtgtgtgcacatatgtgtgtacgtgtgcatgtgcgtgcgtgcatgtgcgtgcgtgcatgtgcctgtgtgtgtatgtgtgcacatgtgtgtgcgcatgtgtgtgtgtgcgcgcatgtgtgtgtgcatgcatgttctcccatgcatgtgtactgtggcaagggagactttgaggaagagattccagtggctgagcagaagggctcgcattgccctggcgaaaggttggaaggcttcacctgagagtgtgtcgtggcctttgtcatatccactgcttgattcctttctttaaaaattatttttattgttttctacatatgagaaccaccacacctggctaatttttgtattttttgtagagatggggtttcaccatgttgtcccggctggtctcaaactcccgggcacaagagatccacctgcctcagcctcccaaaatgctgggactataggcatgagccactgcacccagccactgcttcattcctggtggctgctgtgcctggcatgttgcagatcctccatgaatatgcatttgaatgaatgaatgaatgaatgaatgaatgaatggagatgacgcctcagagattctttcttttgagatgaggtctcattctgtcacccagactagagggcagtggtgcaatcacagctcaccacagcctcaacctcctgggcctcccaagtagctgcgatcacaggtgtgcaccaacatgcccagctaatttttttttttaatttttaatttgtacagacagggtcttgctgtgttgcccaggctggtctcaaactcctgggctcaagtggtcctcccacctaagcttccccaaatactgggattataggtgtgagccactgtgcccaggcttgcctcagatatttgaaggctgggaaggattttgcaaagctgggaaaaggaaaaggcattcccagcagaggggatagcaggtggaaatacataattaaaaaaaaaaaacgtggagcagatccagcgcagtggctcatgcctgtaatcccagcactttgggaggcagagcagggaggattgcttgagtctaggagttcaagaccagcctgggtaacatagaaagaccctgtctctacaaaaacacaaaaaattagccaggcgtggtggtgcatgcctgtagtaccagctacttgagaagctgaggcaggaggactgcttgaagccaggagtttgagaccagcctgggcaacatagtgagaccccgtgtctacaaaaagtaaacatttatatatatattttttaaagtggagcagttcaatatagagtcttttttgaacaaacgtgaaatagatgtcttttttttttttttgagatggagttttcactcttgttacccaggctggagtgcaatggcgtgatcttggctcaccagaacctccgcctcctgggttcaaacaattctcctgcctcagcctcccaggtagctgggattacaggcatgcaccaccaaacccggataattttgtatttttagtagagatggggtttcaccatgttggtcaagctggtcttgaactcccgacctctgctgatccgtatgcctcggcctcccaaagtgctgggattacatgcgtgagccaccgtgcccgacaatagatgtcttttaattttctggaggaaaaagcaaagcaaaagaagcagtggatattttaagactaaaaaggaaaacaaaaaaaggagatagagcaggccagacgtggtggctcaacgtctgtaatcccagcactttgggaggccgaggcaggtggatcacctgaggtcaggagttcaagaccagcctgaccaacatggtgaaaccctgtttcaaaatacaaaaaattagctgggcgtggtggcgggcacctgtaatcccagctacttgggaggctgaggcaggagaatcccttgaacccaggaggtggaggttgcagtgagccgagatcacgccattgcactccagcctgggcgacaagtaaaaaactccatctcaaaaaaaaaaaaggagatagagcaaggaacagtaagaaaatagttgggtgcagtggctatgcggtggcactataggaggctgaggcgggcagatcacctgaggtcaggagttggagaccagcctgggcaacatagacccctatctctacaaaaaatttgaaatatgaaaaattagccaggtgtagtggtgtgcgcctgtggtaccagctactcaagaggcgaaggcagggaagattgcttgagcccaggagtttgaggctatagtgagctgtgatcatgccactgcactccagcctgggcaatagtgtgagactctgtctcaaaagaaagaacatggccaggcgtggtggctcacacctgtaatcccagcactttgggaggccgaggcagtcagatcatgaggccagtttgaaaccagcctggccaacatggtgaaaccctgtctctactaaaaatacaaaaattagccaggcgtggtggcatgcccccgtaatcccagctacttgggggtctgaggcagaagaattgcttgaaaccgggaggcagaggttgcagtgagccgagatcgtgtcattgcactctagtctgggcgacagagcaagactccgtcttggaaaaaaatttaaaaaaa

SEQ ID NO: 44 - DNA, 4650 bp, Homo sapiens
ttcctccctcccgccggccggggtgcgcgggcggcggggcggcccgcgggccatgcgttcggcgcggcccagcccggccggccgggggcggcgccccgagcccgggccccgcgcggcccgcgcccccggcccccgctgagccccgggggccccgctgcggccgaggccatgttcccggtgtttccttgcacgctgctggccccccccttccccgtgctgggcctggactcccggggggtgggcggcctcatgaactccttcccgccacctcagggtcacgcccagaaccccctgcaggtcggggctgagctccagtcccgcttctttgcctcccagggctgcgcccagagtccattccaggtgagtagggccggccgcggcggcccgggctggggggggacgcccgcccgcacccgcggcccactcggcgccttgtctccgcaggccgcgccggcgcccccgcccacgccccaggccccggcggccgagcccctccaggtggacttgctcccggtgctcgccgccgcccaggagtccgccgcggctgctgcggccgctgccgccgctgctgccgccgtcgctgccgcgcccccggcccctgccgccgcctctacggtggacacagcggccctgaagcagcctccggcgccccctccgccacccccgccagtgtcggcgcccgcggccgaggccgcgccccccgcctccgccgccactatcgccgcggcggcggccaccgccgtcgtagccccaacctcgacggtcgccgtggccccggtcgcgtctgccttggagaagaagacaaagagcaaggggccctacatctgcgctctgtgcgccaaggagttcaagaacggctacaatctccggaggcacgaagccatccacacgggagccaaggccggccgggtcccctcgggtgctatgaagatgccgaccatggtgcccctgagcctcctgagcgtgccccagctgagcggagccggcgggggagggggagaggcgggtgccggcggcggcgctgccgcagtggccgccggtggcgtggtgaccacgaccgcctcggggaagcgcatccggaagaaccatgcctgcgagatgtgtggcaaggccttccgcgacgtctaccacctgaaccgacacaagctgtcgcactcggacgagaagccctaccagtgcccggtgtgccagcagcgcttcaagcgcaaggaccgcatgagctaccacgtgcgctcacatgacggcgctgtgcacaagccctacaactgctcccactgtggcaagagcttctcccggtgtgcacggggcctcggccgcccgctaggccgtggggagggagggacgcgacggaggtggcctggccgtggctggcggggagggaggcggctgctgaggctggggaaggggagccactcccagggcggagggaggaagcctctcccggttaccagggagcaaggggtggtcctttgtcgaggaggtgggccttggggttgacggaagcttcgcgtgggaggaggcggcggcggcggcagcggctgctgggctccaggggagggatttcctgcttaagtgtcgctgtgacggcctgggctccgggaggaggcgcagggatcctcggaaaggcctgtggtgcggtttggtggatttggggcgcaccacctccgccctaaccccaaccccaacgtgtccccaggccggatcacctcaacagtcacgtcagacaagtgcactcaacagaacggcccttcaaatgtgaggtaggaagcccgcctcctcctgtcttggttttcatgattttgatcctcatggtagctgtctgagtcagtctctcagaccccctttttctctctcttctttttgcctttttgctccattttctcatcccttcttcaaggcctcatcatgtcactcccatttcctacagatcaaagatccccaaggctctgattcctttaatctcttgctcccccctccccagcccaccaagctttaactctcctgtgacaccccccacgcccctcccccctcctcagaaatgtgaggcagctttcgccacgaaggatcggctgcgggcgcacacagtacgacacgaggagaaagtgccatgtcacgtgtgtggcaagatgctgagctcggcttatatttcggaccacatgaaggtgcacagccagggtcctcaccatgtctgtgagctctgcaacaaaggtacatgccgagggctgccgggagggccaggggcagagggtgggcgcctggccagacgccttgccacggatacgggttaagggtgctgtagccaagagctcgtggcgtctagattcctacaagaggtcaagggagcagcggggggacacctgaatgaacatcattagactctaagaagtcctggttggaagagatgatctgccagagaggttgaacctcctggtaatgtgtggggaaagcgggagtggaacttggctgctctggggaaggagtagtcaagaaagccagttccaggggtcacaaggcaaggtttccgctgcgcagccacaaggtcttgtctccagctcctggggcaggtggagtacacgggccgggctttaccagcacgcaccctgcacgggtagcagagaaagctgccttcagtcagactcaccggttaactgggttgagaccgcggggcactggagggaaggggacacagccgtctctgctgagggtcaaccctgcaagtggctaggagtcagtgtctcgtcatcctgggagaggtctcccggccatggagaatgagttctgtaggtaccaaggctgagaagcgggcaccacacaagccaggccccaggctcagggaggggctgtgtctaccagccccaacagagcagttggccccaggctaccaaggataccgtgggaggaggacagggccatctgaggagggcatcccccgcctaggagatcagccccgtctctggggtctccgcctggctgacccccgccccatcccaatccaccccccaataggcttcaccacggcagcatacctgcgcatccacgcggtgaaggaccacgggctccaggccccgcgggctgaccgcatcctgtgcaagctgtgcagcgtgcactgcaagacccctgcccagctggccggccacatgcagacccatctggggggggccgccccccctgtcccgggagacgccccccagccacagcccacctgctgagggggacccccgcacccaccaggcaaggcgtggggcatggctggggggcgggatggggggtgtgggggacaacggggctcaaagggcccaataggggatctcaggaaggcgagggatgcccatgtaccactcaggctagggagacttctgggcacagggaggatccttgagaactgctctgtctgggtgaggatgcaggctgaggcctctggggtccagataggaagtgagcaacggctgtgtcccaggggaagcaggctgggaaggtgtggggtgagggcaaggctcttgccattcagatcgcgctgtgatccgtggtgtttctcctgtgcaggtactggtgaggtttgtccaatggcggcggcagcggcagcggcggcagcggcagcagcggcagcagtagcagcccctcccacagctgtgggctccctctcgggggcggagggggtgcctgtgagctctcagccacttccctcccaaccctggtgagctccaagttggttgcgggggagaggggagaatggagtagagtcccttggtacaagctcctctcccccctcttttcccaccaactcctatttccctaccaaccaaggagcctccagaaggaaaggaggaagaaatgttttcttaggggaattcgctaggttttaacgatttgtttctcctgctcctcttctgtcagacctgaccccacacaaacctgtcccctcggttgtgttgaagtcccctggacagtgggcaggggtggcagaggacacgagcagccactgcccgtaccccctctcctctctgtaagcccatgccctgtcttcccagggacttgtgagcctcttccctcgacggtcctcttctctccttccagtcctctccccctgctgtctgcagcccctccccggggagttggtgctttcttttccttttttttttttttccagggggagggaggagaggaaggagggggatcagagctgtcccaaagagggaaagcggtgaggtttgaggaggggcagaagcagggccggcaaaggttgtaccttcataaggtggtatggggggttggggtcaggccctgaacatcgtcctacttgagaatctgtcaggggaaaaagtcaaggggagcaggaggaagagccaggagggccagaggcagagaagagatggagtcttaggggccagggtgagcgaggggtccagggcctagaggtgcttcctgggggcgggggaatgcagccagtgtccccctcccctcttccaccccagctccagccctggtcttgtcttttcatccctcttccccacgacagaagaagttgtggccctggccatgtcatcgtgttcctgtgtcccctgcatgtaccccaccctccaccccttccttttgcgcggaccccattacaataaattttaaataaaatcctgtttctggctctggattgaa

SEQ ID NO: 45 - DNA, 18360 bp, Homo sapiens
gagaccgggacgagaccggggctgtggtgcggagagaggctgagacggagaagaggagaggcagagagggcgcggggaccgtcagcagcaccttagctacaatcgttcagctattctcggaagagagaagggagagggaggaggccggggcgggagtgggggctgtcaccctcggaccccggcgtgagaggggccgtgcggccggacgtcctcggggtgggcccccagtcggtggccgaagacctacagctcaggcccctgggtcccaaatttccaggctttgcccctcctcctttctcagatacccgggtaacagtcctcatagtccagatatccgggactcgggtcccaacctctctaaacctgggtctctgtttcatagaatttcaaatatcaggttcaggcccctgcgtgcaccagtatccggggttcattccccgggcgttcaaatatcggattcagtctccatcccgttcagatattcggggttcagaccccacaatcagaaatccggaattcggcagctgtcgccctcgacgagggggaggactggaccgcgaggtcagattaggttgtcaccccctcccctccaggggaggcttcccgggcccgcccctcaggaagggcgaaagccgaggaagaggtggcaaggggaaaggtctccttgcccctctccctgcttggcagagccgctggaggaccccaggcggaagcggaggcgctggggcaccatagtgacccctaccaggtgagacacggggtgcaggggcgcgggtccctgtgtctagttctgagaagaaagggtgcgcctttctgagaagctggacttgggtaggccctctcaggatggggaagcccagctgagcgagtggtcagcctctggctagccttgccttctgttgccacccccttccccttcctcttcccttcattgtgtctggttggtgggggacctcaggtgacagggtctctgatgtcaccggcgttcacaccctagggtgcttcagctaatcagatggatttgcacttcagtcttctctccttcactttgcccctcacagccacctctcctccctgatatgtcccgttctcctggctattctgtggttttgattcccatgcctctgattcccatggtgggtctgcttatctgcttttcaggcctggtctggttggatttcttgtccttgcaaggaagtgtgtgtatatgtgtttgtgtgtatgcgtgtgtgtgtgtgcttggaggtgcctggcaatgttttcccccagctgcagttaccttccaacctcttgctgtgatggtgtcaataatctcatccatttgtcaaacgatctgtcttttacaaagtgctttgacagccattctctcatgtgacatccccgcattcaccctgtgggggcctcttttattggcatcttcccattttacagttgagaacgttgaggccgagagaggttgcccaaggtcacacagtggcagaaccagaatttgaactcaagtcctcaatcacatctttccctgatgcatgcctggttcttgccatctcttttcctctgagtttgggctcggccaggggtccctaggagtccaggctggggtgaggtttaagaatggggatgagatgagcttcctttccaggagggctctactcagaagcttttcctgatgggagcctctggcttttgcctctgcctcatggagttttctatccactgtgaccttcatctttaccccaatcccagggtttggcctggattcctgagagggctctctcctgacaaatggtagcactagtggcatcttttaactgttcaagccaagctgttggggtagaatgatcccccaaaggattaaagctttgtggggaccttggaggcagggaaggaaaaatccatatgctgagtgtctgcatggtgttcctaagtatgagatctcattaaaatcttaacaacagctccatgctgtaatccatttcactgaagagaagaccaagaactggaaggaacttatttaaagccctgttgctgtacattgcagacgggatgtactggtagcatagcttaggaacagatagatacgggtttcctcatctgtagaatggagataacattgttcgttttggaaggtggttatgatttagcacagaccttggttattgttcaagtgtttgttgttattatggggaaggggacctgcatgatgttttgccagtgggtggcacccctccgtgtggcctaggttagcattctggggccttgtgttggtaaagaggtcaggaagattcctttggcaagttgagagcacctgcctttgtgtgtgggtgtgtggtgctggtgaggggtgcttggcactgttgctggcagaagggagaaaagggccggctttgagcaacctgcgagctgctgagggctgagcagagagcaatcactcagtctcccaggctattctgagccctctgcaccctgggggcccactggagagtcaggctccctccttgccctccagcttccagttgggctgagacaaaattaacaacacaacaggaaacaatgcatgacagaataaattacatgctaaaattgttaggtgcttttgagtagctagaactctgccccaggagtccagctctgctgaaggctcctttgtgcctaaattctgacaagtgcttaggctggagcctgtcttggaatctccttgagggttttggttctggtatcctgcaggaactttctccgggtgtttggttgggtgccctaggtgctcttcccaatggctggagtggtcaggacaggcttcctgcaagaggggagctgagcttggggtgacagctgagagagtaatggatacaggcctaaccggggagccgaaggtcctgttctctgaccttggagaagtcctttttcttctctgtgcctcagtgacctcacctaggaaatggtgatcatgattctgccctgcctgtttcgaagggctgctctgaaatcatagtgatggaggaccagctttggacaaggcacttaaccttgctgagcctgtttctttatctgtaagataggggaaatcatagtacttgcttcataaggttgtagtgaggactgaatagagataatgcacgtaaggtactcagtaaatgttatttgtaccctgcaaatgtcctgtacctgtgtgtgatgcttatgcagttggacaggacaagtaaggtggcccagagcacagagaggccctcatagccagatgccatttatatccctattcttcccattctagatctccccctgacttttttgagagtgactttgcgggctcctctgggccagtacccacttctaacaatggacggatttccaccgcctccggcctggccatttcctgttctcttccagggtgtgagaggttgagggaggagggggcctcagcgccaaggggaacagaaaggtgcctggaaacagttggggtataggacttatgggacaggacacttggggctctggagtgctggctgggaagcagaatgttttatccttgaggggagatacaggggctatagggaaatgagaacttgttgagcactgaagggggtggtgaggatacttagcttcccagaatcttcctagcagttttagggactccagggacccagcccgcgtgatctggttgccagggcaacttcattttttggagctttgatgttgttcctaatctccccctccccttcctcagcagtgcctcctcctcatcagggaatgaggggaggagatggcagaaacttgatgggtcccttcctctccctgaaggctcaatccttgatctctaagggtcccatttccattcctcaggccaggccccactctcagggcccccaggggccaccatgccagctgggggccgggccgggagcctgaaggacccagatgtggctgagctcttcttcaaggatgacccagaaaagctcttctctgacctccgggaaattggccatggcagctttggagccgtatactttgtgagttgggtcttgggagggtgtaatagggatggggactcttcctatccctgtggacttcccaacagcccttgcacactactccatcacactggtctttcctgccttctcttgctgggccagcaagtcttcccatgcccggctctcaatggggccttcaacaccttctggtctggtcctctaggcccgggatgtccggaatagtgaggtggtggccatcaagaagatgtcctacagtgggaagcagtccaatgaggtgggccaggtgcaatacagccaggttggggacaggggactcctgtctcaagatgcaagctgggtaacctctgcctaccctgaccccctagaaatggcaagacatcatcaaggaggtgcggttcttacagaagctccggcatcccaacaccattcagtaccggggctgttacctgagggagcacacggcttgggtgagctggtgccagattctggcctgatctttactcctattcatgcccgtccttatcgtagtccagtctcttaggtggtccctgttcgtggtgctgttgtgggatcttgggaaggaggaagtctcttttgaccgctttagtcctcagacatacccactgagcaaaagcctggctcagtgacacaggctgttagcaggtgggacaggtcactgtgggctggagaaggtggagattgaatgggagtttgaagggattcagatgggcagtggtgaatgtcttgggcccagactctagaaactctcccaccaccccctcattgtctccagttgcgcttcctccctgtcatcaccccggggacatagcttgagtacaggacagtcaaggaagctctgttttgagtccctgcccaggagactctgatctctgacccttgtctcttccttagctggtaatggagtattgcctgggctcagcttctgaccttctagaaggtaagtgactgataggccaataagtggagaagggagaagagcaggggagccatagggaagggttaaggggagtttattccagtcccacccttgcgctccctcgggttgatgttcttcctcactctccagtgcacaagaaaccccttcaggaggtagagatcgcagctgtgacccacggggcgcttcagggcctggcatatctgcactcccacaacatgatccataggtacaagcagcaccggcagtgcctgggaggggagtgctatctgcaccacctgtcacttagctgggctgcccctgcctagctttcttgagacacatgtctcatccctgtactttgcctctggcagggatgtgaaggctggaaacatcctgctgtcagagccagggttagtgaagctaggggactttggttctgcgtccatcatggcacctgccaactccttcgtgggcaccccatactggtgagtgagtgagtggtggtgagtggagagacctcccagggatgttgggagtaggagtgacagggtctcggcgggtgatttgcctctctctcctgaccattctcctaggatggcacccgaggtgatcctggccatggatgaggggcagtacgatggcaaagtggacgtctggtccttggggataacctgcatcgagctgggtaagaacatcctccctgttccctcatcatcttttccattctttcctgttagttcccagactccggactacccccttctcctagggatgggatcccaggcctccaagttcctgtccgttgtgactctaccctggagcccaatacaggcagctggcaaattctgccagctcttaggcctagagattttgtagcattcatctcttcctgtccactaccctggttctgaatcttttcttagtgcccaccatgtgctgtgccatggactgtgattctggagggatagcagtgaatgaaaatcctgccctcatggaacttacatttgatttagggaaaccaggcaggcatgttttctttcaatgtgatgaacgctgtgtggagaagttacaggagcggttcaaatgtaaaacaggggacttgacctagtttaggggctgaagaaggcctccttgtaggagaatattgaagccaacctgcaagataaataatagctgtttgcagaatgtagggaagagctttccaggcagagagaacagcatgtgagaggcctagaggtaagtgcaggcctggggaactgggactagcttcagttatttggaacctagcatgtaatgcagagaatattgaaggataaggccagagagttaggtccaagtgagttcctaaggccttgaagccatgccaaggttctcatctctgtcagccagcactattgaaacaattctttaatgaggtaggtaacctttataaggcttccaacacaatgccaggcacaaaacagttgcctaagagttgctgttagtttctcttatcaacagcctcctgcagtgatctctccagtctcttctcccttccagtctgtcttaagtactgatgccagagaggtctgcctaagctcagtgctgtcatttcactccctgtttggagccatgagtggccccctgttgccttcaagactgaagccatccccatccttcctcccaccaacctagaggctttgcttcgtaaatgctggccctttccttcatgggctccaccctctgagtgtgtcatgaactcttccacttccttgccttggttcgtattgggtcctctgcccgaggtcagagatttggacgagcccttctcctccatcttcacagtctccatttaccattagatgccaggcccagacagttgatgaaaaatgtaagaaacggacccaagtataagaaaaagctagatctgtccattttatttctagtttttggaagagatgtggatacagagaaatattactctactattgaaaaaaatatatatcagtctgattataaatgtcaactcatactaagtcaatatcagggaagcagtgtggagaaggatgtggcaaactggagattgctgtttccatagaaagagggcagctaatgcttatctccagaccattgttatgcagtaatgtagactccatttcaccagatttaattcttaaggagaaactggaaacttgtattattatttgattattacttttggcagttaattttaaaaatcaccgtttaggccaaaacaacatgacatttgtctgggctacaagggactcttagcgactcttagcttgcacttacctttctaatctcagggctttttacaaagcccttctctgaattccctgaagatatgctagcttgaaggctcactgcatactctcaacttcccagccacttccctgtttccctcttataccagttaatactttgatgttattttttcagtcctatttaatcttttagactggaggttccttgagggtggggcctaattcttgtttttatcttccccatagcaattatcaagttatctgctccctttggcacctaagaaatattagttggggtgataactgaatggctgtccttctgccttcgttactgcttttgtggatgttattttctttgacccctattccacccgtgtgcagtggagaggatgggtgttgtattttacagaggaaggaattaactgagacgcaacaggatgatgggaacttctcaaggtcatgtggcaaggaagtcaaggaattggggtttgaacccaagtcgtctcagttccattccattgtcctctaccccctgccacctctcaccttcttccctttcacctttttctgtagctgaacggaaaccaccgctctttaacatgaatgcgatgagtgccttataccacattgcacagaacgaatcccccgtgctccagtcaggacactggtgaggactgagattccgaatctgggcccaggcgttaggccatggggtatggatgcctgactcatgccttccccacccctctcccaccctcctgtgactttcaggtctgagtacttccggaattttgtcgactcctgtcttcagaaaatccctcaagacagaccaacctcagaggttctcctgaaggtgagggcctgctggcctagcattctcctggaactgtagcttgttacagccacaagaacccccagggaaattagtggttcccagttcctcctccaccaagagcttcgttgatgaattcccaccccatccccaatgcctagtggactctgtgttttacaagattttgtctaccagactgccttaatttattaagtaataaactgttttcccttcttttattaatcaaagatttatataattgccagccagagcttctggtcagcatgtgataaccagggttgccccactgatctgatgtaatgcaagccaaaagcctgtgtagccttatcatgggtaaatgtatgatttcccttaggtgttttttgaattatcaaaaatggaggggccccattcccttcacagacccatgggggcctgaggagccgtagttggaaacttcagattatgtagttggacccacttgttttataattgtaggatactgtatgaagcccagaggggcctcatgacatgtccaaggtcacatagccctttagtagaggagctggacgagaatccagttctcctgactgtccctgcctgtcagccatgcttagaggaagaagagtctgtctggggagtaggtactgggtggtacagaaaattgtgagagaagggcttgggataaggccagcatcaacccgtggtgggcgtgggccccagaagagtgcctcaggcctgagggaatgccaagggctgtgggttgtggggggaaggggagttggcagcagacctcagtgccctcttcccccagcaccgctttgtgctccgggagcggccacccacagtcatcatggacctgatccagaggaccaaggatgccgtgcgggagctggacaacctgcagtaccgcaagatgaagaagatcctgttccaagaggcacccaacggccctggtgccgaggccccagaggaggaagaggtgacccagcttgccctaacacccctctttataccccatgtgtgcctgccccctgcagttgcttggccccttccccagccctactcacaccaccatcttcccatgctacctccatgcatatgccccagggcttccccttccctgtccagcagcctacgccctgttcgcaggaggccgagccctacatgcaccgggccgggactctgaccagcctcgagagtagccactcagtgcccagcatgtccatcagcgcctccagccagagcagctccgtcaacagcctagcagatgcctcagacaacgaggaagaggaggaggaggaggaggaagaggaggaggaggaagaaggccctgaagcccgggagatggccatgatgcaggagggggagcacacagtcacctctcacagctccattatccaccggctgccggtacacagctcacccttgggggacccgagccacctgctctagaactgcctgggtcttcgccctccttccctaagtgcagcactcctctgagtctgattggctgtcctcaggtagctctctttggacccagtggcctctgagccttgggtgttccttctatctccctctagggctctgacaacctatatgatgacccctaccagccagagataacccccagccctctccagccgcctgcagccccagctcccacttccaccacctcttccgcccgccgccgggcctactgccgtaaccgagaccactttgccaccatccgaaccgcctccctggtgagtgtagccatcctcactcagcctgctcgctgtctgttttttaagtctttttaagtctagaaatgatttcctccctgtggcatgggattgagtctggattctaccctcattttctgttgctggctcctgcctgctccccttaaccctcctgcttccctcctcttcccagtggactgttttggtcatatggcccaatctgggtgtttctagcttggcaaactcttactccgtttttgtggcctgacttaactgacatctcctgggttgccttcccaggctcctctggtgagtcagatgcttcacagttgtgtgctggggaagcccagtgctgggggagccctgtgcctgtggagccctgtgctgggggtgtccagtgctggggagccctgtgccgggggtgccctgtgcttgggtggtcctgaacagcatcatgataggtttgccagattctgtgccccagagggcagggatggtgttcagatatctgtctcatgccagcagttagctctcaggcttacacacaggcctgtgttaaccctcccagcccccctgggaggggaagggtaagatcccattggagaaatgaggcacctgtggctcagaggggccacttgccccagtgcctttggtggctctctgctcctgtaagcaggcccttagtcctctcctaaaatcaactcatggcagtctttctcagttcacaggaaaaagtgtttaggcttttcataaaacatagtttttcatctatgtttttagatcacgttcctgctgagctgcatttgagcgtcaacaatccccttagaggccactgattaagtctagtatgttcttatggcctctgcttggtgctggttgtgttccaacaattcttcagatcccatggtgttgtgcggtactgtgctgagaggtcttgactgccaggggcttggctgccgggactagtttgagagccactcatagagtcaattgagaatgagacctgagatcagactttggatgaaggtgtccaagcccagtgttcttgttattccagcatcttgtggccccgatcccacctcaatacctggggagtgataggccgaccatgtttgctgaaggggaaggaagccaacacttattagatagagtccgaacttaccccacagcccctatgaggaggtattatttccccatttaacagatgagggaactggtgctttgagaagttaacttacttgagatcacatgcttggtaagtggcaaagctgggatttgatcccaggtatgtctgactcactgtttcaaattagtatggattgttcctacttttgtgccaggccctgtgctcgccaccttttatcattcggccacaccaacttgtgatgtagataatatcaccattatccagttgaggaaacaggctagagtggccgtgtgtgaggaaggtgttaaatgagaatgaaacccatgagttgaaaacccatgctcttccccacggaagaccccttgtgttaattaactaggggccaggctgagccccagctctcaccctctctccttccccaggtcagccgtcagatccaggagcatgagcaggactctgcgctgcgggagcagctgagcggctataagcggatgcgacgacagcaccagaagcagctgctggccctggagtcacggctgaggggtgaacgggaggagcacagtgcacggctgcagcgggagcttgaggcgcagcgggctggctttggggcagaggcagaaaagctggcccggcggcaccaggccataggtgagaaggaggcacgagctgcccaggccgaggagcggaagttccagcagcacatccttgggcagcagaagaaggagctggctgccctgctggaggcacagaagcggacctacaaacttcgcaaggaacagctgaaggaggtgagctagggctgcttgggggcggagccgatggcgagccaggtgggtcctgaccctgcttccctctgcactcgcccaggagctccaggagaaccccagcactcccaagcgggagaaggccgagtggctgctgcggcagaaggagcagctccagcagtgccaggcggaggaggaagcagggctgctgcggcggcagcgccagtactttgagctgcagtgtcgccagtacaagcgcaagatgttgctggctcggcacagcctggaccaggacctgctgcgggaggtaggcatcccaatctctgttcccctcccgctcactcgtggatcccagggacccacccttttccattttcctcattcttgtcttctttctccttggccctcgagtgttacagttcagctttgcttcagtgccccttttacttctcatccccaacagaccctgccagaatttccttaggcctcttttcccaggccagggaggagcttgcctcccctacaccctcatctcctgccatccccagctccctctgccaaggagccctggcccctcacttccttgatactgaccaggccctgggccctgtgtttcttccgccatccccagctccctctgccaaggagccctggcctctcacttccttgatactgaccaggccccgggccctgcatttcttctgcctcaggacctgaacaagaagcagacccagaaggacttggagtgtgcactgctgcttcggcagcacgaggccacgcgggagctggagctgcggcagctccaggccgtgcagcgcacgcgggctgagctcacccgcctgcagcaccagacggagctgggcaaccagctggagtacaacaagcggcgtgagcaagagttgcggcagaagcatgcggcccaggttcgccagcagcccaagagcctcaaagtacgtgcaggccagcgccccccgggccttccactccccattcctggggctctgggcccacccaacacaggcacccctatagaacagcagccctgctcacctggccaggaggcagtcctggaccaaagaatgcttggcgaggaggaggaagcagttggagagagaaggattctgggaaaggaaggggccactttggagcccaagcagcagaggattctgggggaagaatcaggagcccctagtcccagtccacaaaaacatgggagcctggttgatgaggaagtttggggtctgcctgaggagatagaggagcttagggtgccctcccttgtaccccaggagaggagcattgttggccaggaggaggctgggacatggagcttgtgggggaaggaggatgagagtcttctggatgaggagtttgagcttggctgggtccagggcccagcactgactcccgtccctgaggaggaggaagaagaggaagagggggctccgattgggacccctagggatcctggagatggttgtccttcccccgacatccctcctgaaccccctccaacacacctgaggccctgccctgccagccagctccctggactcctgtcccatggcctcctggccggcctctcctttgcagtggggtcctcctctggcctcctgcccctcctgctgctgctgctgcttccattgctggcagcccagggtgggggtggcctgcaggcagcgctgctggcccttgaggtggggctggtgggtctgggggcctcctacctgctcctttgtacagccctgcacctgccctccagtcttttcctactcctggcccagggtaccgcactgggggccgtcctgggcctgagctggcgccgaggcctcatgggtgttcccctgggccttggagctgcctggctcttagcttggccaggcctagctctacctctggtggctatggcagcggggggcagatgggtgcggcagcagggcccccgggtgcgccggggcatatctcgactctggttgcgggttctgctgcgcctgtcacccatggccttccgggccctgcagggctgtggggctgtgggggaccggggtctgtttgcactgtaccccaaaaccaacaaggatggcttccgcagccgcctgcccgtccctgggccccggcggcgtaatccccgcaccacccaacacccattagctctgttggcaagggtctgggtcctgtgcaagggctggaactggcgtctggcacgggccagccagggtttagcatcccacttgcccccgtgggccatccacacactggccagctggggcctgcttcggggtgaacggcccacccgaatcccccggctactaccacgcagccagcgccagctagggccccctgcctcccgccagccactgccagggactctagccgggcggaggtcacgcacccgccagtcccgggccctgcccccctggaggtagctgactccagcccttccagcccaaatctagagcattgagcactttatctcccacgactcagtgaagtttctccagtccctagtcctctcttttcacccaccttcctcagtttgctcacttaccccaggcccagcccttcggacctctagacaggcagcctcctcagctgtggagtccagcagtcactctgtgttctcctggcgctcctcccctaagttattgctgttcgcccgctgtgtgtgctcatcctcaccctcattgactcaggcctggggccaggggtggtggagggtgggaagagtcatgttttttttctcctctttgattttgtttttctgtctcccttccaacctgtccccttccccccaccaaaaaaagaaaaagacaaacacaaataaaatatctgagcggaactgtgcctttggcccaggctgcctctgtctgctttgtcctgccgcctagcctccccggtatgcccccaggctgaccctcggcccggctccatgacctcttcaccccatctccgttatctcagccccctcactcctccagcctcatgctctctgccttcatagcttcattgcaccatgaccaccaccggctctggggtctgggcccctgtagaacttcaccgaacttcttggtcccacagagcgcctgtttgcgggttccttccagaggtcttagtttccaggcccttggtctcctcatcccttgccttttctcccaaccatggctgcaggggaccaaattgctctcctgcatcaggcattaccctagtgggttgggggacggggctgcagaccctccacagtagggggtgctgagctgggggcaaccaggcggagtatgaaggctgtggcagcaggattgagtgtgggcctggagtgggagctgagtgtgtgaggggccgggctggaatgcggatctggtcagggtggtagctgctggccggttgaacttgtcaggccctttctggccacctcctttgcccctttctcctctgcggcccaaaatggggcagccccttcttacccatttctcagctcggtgcttctcctccttccctgccttcctccctgagctgctggacctgggacttcctgtgtctgtccttagtcgtgttgctttcttcatgggtgttttgtgtgactggttcttctcgcttgttctcgtgcacgttctcatatttgctcacgtgcttctgtctctaggtcacagtctctccctctttgcctggtcagagcttccaagatcctcagttccctgtccagtaactccgatgttctttctcgtgggtatcgcacccaactccgtgcacgtgctcttggaacctcttgtcttctctgcatctcttgcccatcgagaccttcctgatctctctcaacacgatcccacctctccatgtctgtctgtctgtatacagctccccccaccccctctgtctaacatgttttctgtttctctccctctccctgtctctgcttctgtctcctctcctcttctctctcttctccccatttcccctggttgttcctcctcttcctcttcctcctcttcctcctcctcttccccgctgcccccatctccccttgatccgtccactgcatagtctaaggagctgcagatcaagaagcagttccaggagacgtgtaagatccagactcggcagtacaaggctctgcgagcacacttgctggagaccacgcccaaagctcagcacaagagcctccttaagcggctcaaggaagagcagacccgcaagctggcgatcttggcggagcagtatgaccagtccatctcagagatgctcagctcacaggcggtgaggcctggggtccagggagggagtgcgctagaggccaggctctgtactttgctttagagaaatggacggtgcagggcatgcacagagctggggcttttttacttgggaaactcacatactctccctctgttcgtgttctccacaatgatttatttcatattctcctcagtggttttattctttctcttagtattttcttaaggtcttgacaaagccatgtgcctattcccaagaaccaccaaggaaaagagtggctattatttttttcctgggcctgagttagtttaatgggtaaacagggtgcagattaaagtgagtgtggccctcaagcccatttactcagacttctggaggattttgaaagttgctgttctaaaaaaatgatcacacctaacactggaatgggccacttaaaatgtgcggagagggtggagagtggaaacgccccacccaaggctgttctctcacccagtcccacctctcccaggtaacttgttaataattaactgtattttgtgttttttcagtgcacattttgaaaaattatatgaattttaaacacagatggaatcatactttacatttactttctgtaacttcttttttccacttaatatttcttggacatcttcccctgtcagtacacctgtctcattttttttacagcatagaattttccatggtatggctgtaccataatttatttaacccatcccttattggtggacatttaggttgtttccagtattttgctatcacaacgcttccgtgaacacctcgagcacatgtgcaagtatacctgggggatagattctgcagtgtaattgctgtgccacagggtatgaccatcttccattctgatagatgttgagaccgctgcttcttgaaaccttagggcccaggcctacctggggcaggggaggatagtgggggtgggggaggagatccctacaactggttgttcatcttccccagctgcggcttgatgagacccaggaggcagagttccaggcccttcggcagcagcttcaacaggagctggagctgctcaacgcttaccagagcaagatcaagatccgcacagagagccagcacgagagggagctgcgggagctggagcagagggtcgcgctgcggcgggcactgctggagcagcgggtaaggggcccagcctccaggactggggagggagggtgggctcctgcccccgactctaacctctgttccggatgccccaggtggaagaggagctgctggccctgcagacaggacgctccgagcgaatccgcagtctgcttgagcggcaggcccgtgagatcgaggccttcgatgcggaaagcatgaggctgggcttctccagcatggctctggggggcatcccggctgaagctgctgcccagggctatcctgctccaccccctgccccagcctggccctcccgtcccgttccccgttctggggcacactggagccatggccctcctccaccaggcatgccccctccagcctggcgtcagccgtctctgctggctcccccaggccccccaaactggctggggccccccacacaaagtgggacaccccgtggcggagccctgctgctgctaagaaacagcccccagcccctgcggcgggcagcctcggggggcagtggcagtgagaatgtgggcccccctgctgccgcggtgcccgggcccctgagccgcagcaccagtgtcgcttcccacatcctcaatggttcttcccacttctattcctgaggtgcagcggggaggagcagatgagctgggcagggcaggggtgggtggagcctgaccctggagggcactgagctggaggcccctgcaagggtaggggacaagatgtaggctccagctcccctcagacctcctcatctcatgagcttcttggggctggccagtggcccagggccagcttggcgataggtgcctcaaggctgcctgggagccccgcctccctaccatggtgccaggggtctccctccgccacctaggaaaggagggagatgtgcgtgtcaaatattcatctagtcccctgggggaggggaagggtgggtctagacatactatattcagagaactatactaccctcacagtgaggccctcagacctgccacagggcagagcaggtctggggcctgaggcagggagaatgagaggccaccttactggcaggaaggatcaggatggggtcttggggtcaggatgcctgggtctcttcccgtaactgtctgacgtcctgtgccgtcttgtcctttatctttttttttttttttttaattgggatcagggctggggcggggaaacaagggaaggaccttggaaggggctgctcccaggcctggggggcagtcgtgggagcccctctcagctgtggggctggcacagagccccaggcaagcttttaataaactgttggttattctaacag

SEQ ID NO: 46 - DNA, 6127 bp, Homo sapiens
agaagctgtcggactgtgagcgccttcgaactttggaggcttggctcgggatggaggtttttttagcatggggaccagggaggactacggtgctcgggactgggctgcggcctcctcgcggccccgagtgccctgtgaaatcagctcaggccgcgtccctctagcctgcactttccctctgttcacgctgcttccctccagggcccggcctccaagtgaaggggggcggagggcggtcacctgccagaaggtctggggcgccaaggtgtgtcccgggactcttggctccgtccaggttccaggccccgccccccagcttatccctagccggggctccccaccgtgggaacggggaccagctggccggaagcgccaaactgcgtccctgtccgagccctggggatcaatcaagccgaggagttaattatgtaatgagggggcagggggtcgaggctaatgaagcctcccggggtggggagggaggggaggaggggaccgtacccaggtatccgaccccctctcggaccccttcgaggccccaggggtctccaccccagcccaactccagggccccaaagaggggaggggctgtgatcctggatctggaaggggctgagctgtgagctataaagggggcatctcgcagcaccgggggccctaagcagcgagacctgaggccagacggaactacaacatgtaccatccacgagaattgtacccgtccctgggggccggctaccgcctggggcccgcccaacctggggccgactccagcttcccacccgccctagcggagggctaccgctaccccggtgagcgttgggaccagctcctgggtaggagaataggggggctgtggccctcggctggctcctcattcttccccggcttccagaactggacacccctaaactggattgcttcctctccgggatggaggctgctccccgcaccctggccgcgcacccacctctgccccttctgccccctgccatgggcactgagccggccccatcagctccagaggccctccattccctcccgggggtcagcctgagcctggagaaccgggagctatggaaggagttcagctctgtgggaacagaaatgatcatcaccaaagctgggaggtgaggggctggccagggtccgtgtttctggtgggggtctcttgggaaaggcagagtccctggggagggggctaggactgggtggttcccgaggggctagagctctgcctaggcctagaatctgactatggcctggggcaagggttactctgtggcaggaatcaggagtcactctgtgacaagggttaagggccagtctgtggagtctgtggctgagtttagggaccaatctatggcaagggtcatgggtcagtctggggcagggtcaggaagtccctctgggttataggttagtgtgtggcttagaccagcatccagacaaggacagggggtcaagggccagcccattgaccagcatcagggaaatctggccaggattcgggatcagtatgcaactcgaataggagtcagtatatgactaggtccagggtcaccctagaggcagggacacggtcagtgtttgaccttagatgaggtctttagctggggcaggaactcaagccctagcatggaaagtcctcggccctactgcaggcagggtatattttttctaaagcaaattcatctaagagctgcagattctggtgctggagatcaggggaggagaggagggtggggacaggaagctcctagcaagaaagttagtcacccctgcttctgcaaataggctttgaggggtaggagtcatggctctgttcctaacctgctgtgtgacagatcacttaacccgtctgtcctgtttccccaaatgtaaaatgagacaagaaaaccttccagctctaagattccgccctctggcttctttttttttttttttttttttttgagatggagtctcgctctgttgcccaggctagagtgtagtggcacgatctcgtcagctcaccgcaacctctgcttcctggattcaagcgattctcctgcctcagcctcccgagtagctgggactataggcacacaccaccacacccggctaatttttgtagttttagtagagacggtgtttcaccatattggccaggctggtctcaaacttctgacctcatgatccttccacctcggcttcctaaagtgctgagattacaggcatgagccactgcgcctggccctttttcatttttcagagacagtgtcttgccctgttgcccaggctggagtgcagtggtgcaattgtggctcactgtagtcttgacttcccaggctcaagtgaccctcccgcctcagcctctgtagtaactgggactatcagtgtgcaccaccatgcctggctaattttttaatttttttgtagagatggggtctttctatgttgcccaggctggtcttgaattcctgactcaagagatcctcccaccttggcctcccaaagtatagggattagaggtgtgagccacagcctccagcctgccctctgggttctaattccacctcctttgatgtttctctgacagctctggggagcccgttgttatgtcccgttactggtgctgggcccacccctggccagtgggtagctccaggcctctcctgtcccctcccttgcacaggcgcatgttccctgcctgccgagtgtcagtcactggcctggaccccgaggcccgctacttgtttcttctggatgtgattccggtggatggggctcgctaccgctggcagggccggcgctgggagcccagcggcaaggcagagccccgcctgcctgaccgtgtctacattcaccccgactctcctgccactggtgcacattggatgcggcagcctgtgtctttccatcgtgtcaagctcaccaacagcacgctggacccccacggccacgtgaggcccaggctgggactccaggatagggttggggggtgctggaagggaggccaagggtgaggcgcagggcagggaatcactcccatttcctccctcccagctgatcctgcactccatgcacaagtaccaaccccgcatacacctagttcgggcagcccagctctgcagccagcactgggggggcatggcctccttccgcttccccgagaccacattcatctccgtgacagcctaccagaacccacaggtgagtgaccctgcttgagggggtggtggccccctgcccagaccgcagttgctttgaccctgcatgtgtgtccccagatcacacaactgaagattgcagccaatccctttgccaaaggcttccgggagaacggcagaaactgtaagaggtgggagttgttcattcatttgttcatgcattcaacaaatgtttattaatcactcactgtgtgccaggcaccgtgctggacatcagaaatgcagtggtaagtgaaaacattcattcactgactcagcaaatacttatatagtacctgctatgtgccagggacagttccaggcactggagataaaacaaacaaagcaaaccaaagccccggccctcatgcagctgatttctagtggggagagtagacaagcagacaagagaaataaataaaatgtcatctgttaggaagccattctaaagagaagagagaccaggtgtggtggctcacgcatgtaatcccagcactctgggaggctgaggcgggcagatcacctgaggccaggagttcgagaccagcctgccaacatggtgaaaccctgtctctgctaaaaatacaaaaattagccaggcatggtggcaaacgcctgtaatcccaactacttgggaggctgaggcaggagaatctcttgaacccaggaggtggaggttgcagtgagtcgagatcatgccattgcattccagcctaggcaacacgagcaaaacttcctctcaaaaaaaaaaaaaaaaagaaagaaaagaaaactctgtctcaaaaaaaaaaaaaaaaagaaaaaaaagaaaaaggagaagagaaataaaccaggaaaagataggaaggactggggtgaggtattagataagaggcctggaaaggcctcagtgggaagaagacacttgagaaagagctgaaggaagtacgggagggagccaggtgggcatctggcaaagcacactagggagtgggaacagcacgtgcaaaggccctgaggtggggctgtgcctgtggcgtggctgcagtggagtgactaagagtcaggcaggggaggggaagccaggttatgtcggacagtaaaggttccgtaaggccgtgggaactgttccaagtgcagcacctcagagctggcccctgccctcaagtagcttccagtttgtcagaagagacagacatgaaccaaggagtcactccatcaaatgcaaaagcagaactgtgacggatgttatgagggaggggtgtgtgctctcggaggtcagggaggacttccttgaggaacttgcgcttgcagtgaggcaaggataggtttggtggctcatgcctgtagtcccagcactttcggaggctgagatggaaagatcacttgagcccaggagttggaggctgcagtgagctgtgacctgtgactgtgccactgcactccagcctgggcaacatagcaagaccccatctcaaattttaaaaatgaaaagaaaaaggacaggttcagcccgtgaagaggggacagaagaggattccagagagaggctgagagtggagatggggcagaaagatgagctaggtgagactgtgccctggccttgccactgggaaggagtttccactgatactaaacacaataggaaagcatggacaaatttgagcagggacaaaattccagctctgccactttctagttatttaattttctggccttcagtttcttcatctataaaatgggtataatgatggcccctacctgacagggtccctgggagggtgaaatgcctggcaccgggtaagtactgttaccatcaccatggccatcaccatcatcatcatcatcaccaccactgttccccagggagcgagacgcccgtgtgaagaggaaactgcggggcccagagccagcagccacagaggcctatgggagcggaggtgagtgtagtcccgatggcgatggggccaggcctgagacagggatcctccctagcccaacctctcccttccctctccccagacacaccaggtggtccctgcgactccaccctgggtggagacattcgtgaatcagatccagaacaggccccagcccccggggaagccaccgctgccccggcacctctgtgtggtggccccagtgctgaggcctacctcctgcaccctgcggctttccatggggcccccagtcaccttcccaccaggtgagtgggacaggggaccaggcggggctgcgggtccctctgccctgctctgacatccctctctccatgtcaggagccccagcttcccggaggctccagactccgggcgctcagccccctactcggctgcatttctggagctgccgcacgggtcagggggctccgggtacccagcggctccaccggcggtaccctttgccccgcactttctccaagggggccccttccctctaccatacaccgcgcctgggggctatctggatgtgggctccaaacccatgtactgaaccactgctgggcccctctgcctccatcacaaacctcccgctcccttcccccagccctggagccccctcacctccaccggccccatcccccacaccaaatggccgccttgggcctgcccacccaccccctcaacttcacaccttgatttcactcccacccccctctggcttcaaagcctaaccaaggctgctgggagtccagctggggccggcttccccttcccggctctcacctccgtgtgaatggaaggggctctgcctggccaaatggggccacagaccagcatccccacttaccaggcctccccatgggctctggaggggctcaatccccacccccccacacacactggtgcaggccacaccagtctgttgttctgggaccagagtatttttgttaataaaactcaaaagccatccatgctcaggaaacattgggctcctgtgtttggccctgggcgggg

SEQ ID NO: 47 - DNA, 39180 bp, Homo sapiens
acagggcaccgagggaaggaggacgcgagggcagccaggccctagggagcagggagagtggctcgggctcagtcgcgtggccccaggtgcgcgtcccaggtgcgcggccttgacccagcagcgtccgccgtgctggccggggcctcggctccgcagcagaagccgcggtggtggcagccggcgcgggcgcagctgcccgcggctggggcgtttcatctgcgccggcctatggtgcgggcatcgccctgggccacgcgctgatcgtctccatctcactcagaaaaagttactcatacagtggtcttgtaaagggtctgaagtggtcaaattgtccctttttagaaacggatagttttaggtcttaaagatgtcctagaaattacccttacaagcccagctctgtcattttatagtaagggacactaagatcgcgtacagagcttgtcggaggggcttggtcttctgtctcacgctcagggttgtctcctcgttacaggagaccttgctcttaaacgtttcagagttcgcttttccccttgctgaattcataaaaatgtttttaatttatatgtgtttcttcttgtaggaagaagaaattgtcgagacgaataacatgaggtcatatagaatcccacttttggtgatttcaagtcaagaaagtaaaagtaaaccattgctatctttcaccttaaatatcctgtgttttattgctcagaacatccagtttttctaatactcatgatgtcagaagggaaacctcctgacaaaaaaaggcctcgtagaagcttatcaatcagcaagaataagaaaaaagcatctaattctattatttcgtgttttaacaatgcaccacctgctaaacttgcctgccccgtttgcagtaaaatggtgcctagatatgacttaaaccggcaccttgatgaaatgtgtgctaacaatgacttcgttcaagtggatccagggcaggttggcttaataaattcaaatgtgtctatggtagatttaaccagtgttaccttagaagatgtaacacctaagaagtcaccaccaccaaagacaaatttaacccctggccaaagtgattcagcaaaaagggaagtaaagcagaagatcagtccctactttaaaagtaatgatgtggtgtgcaaaaatcaagatgagctgagaaatcgtagtgtgaaagtcatttgtttgggaagcctagcatctaaattgtccagaaaatacgtaaaggctaaaaaatcaatagataaggatgaagaatttgccggttctagtccacagagttccaaatccacagttgttaagagcctgattgataactcttcagaaattgaggacgaggatcaaattttggagaacagttctcaaaaagaaaacgtgtttaaatgtgattctctaaaggaagagtgcattcctgaacatatggtaagaggaagtaaaataatggaagccgaaagccaaaaggctacccgggaatgtgagaaatcagccctcacccctggattctcagataatgcgatcatgttattctcaccagatttcactcttaggaatacattaaagtctacttcagaagacagtcttgtaaagcaagagtgtatcaaagaagtggttgaaaaacgtgaggcatgtcattgtgaagaagtaaaaatgactgttgcttcagaagctaaaatacagctgtcagattcagaggcaaaatctcatagttctgcagatgatgcttctgcatggagtaacatccaagaggctcctctgcaggatgacagttgcttaaacaatgatatccctcacagcattcctttggagcaggggtcaagctgcaatggtcctggtcaaacaaccggtcatccttactaccttcggagtttccttgtggtgctgaaaaccgtacttgagaatgaagatgatatgttgctctttgatgagcaggagaagggaattgtaactaaattttatcagttatcaggtatcttacgcacgtgtttgttttcaagttttcattccccttttgctgctctgattggggcatgatgtgatgggcagtaatctagtgaccgcaaggagtcactgtggtgttgtgagcaccctgtgggagtgttcatgggagttggagcatagtcgaaggttttattgagagggatgcatggaaaagagacaagattttgtcccgggtgatgtttactcctgctgaactttggttacattggaagcagctgtttttcttttataggtacatttgatagttatgaaacaaccttttccagattaaaaaacaatataatgtgacttagaaaagcatactttgcattttgagcgtgtaatcaggctttccattaggttgttttgttgttcctcaaagatgaaagtagaataaaatacaatacaggaagaaaacaaaccaacctgaggcatattttctttctcccaacaacattttagatttatggactgtgccttttaaagacagggtgtggaggaaatggaaactttcaagctgaaattggtacattaaaaatactagtctatgcctgaagtccttggcagccaggggtggctccaagccagcagtgcaggtttgtagtaaaagccacccttgtgtctttacggtgttattcagagggccatgatgactctgtggaaccatgtccctgagggcaggaaaaaacatggtagtcacactgtcgtttagtaaaatgcggccatgtgtgactcctcagtagataaaaaagagaaaaatcctgaacattactattgatgttcaagggaaggatttctattttaaattcgcacagtgaaattatggtattccttgggttactttttaacatgtgagcgatacttctctgggcacagctgtgtgtagtatccacttccatctctacttttgctgttctcaccagaagatggacataatagcacattggcttttctatccaaactagtcacagatctttggttgggtgctgattgcattcctggagtatttcagagattggtggctctgtaattccatgtaattgagaaataggaacagttttcctagtgcaagttctgcatatgcatgtgtcttgcactccatggagaatcatgtacaatctgttggtgtgtagaaataattactgctaattgtttttgcctttttttttttttaattttaagttcttttagagacaaggtttctgtctgttgcccaggctggagtgcagtggtgtaatcatagctcactgtgaccttgaactcttggtcccaagcgatcctcctgcctcagcctcccaaagcactgggattacaagcataagccataggctgggcatggtggctcaggcctgtaatcccagcactttgggaggcccaggtgggcagatggcctgaggtcatgagttccagactagcctgaccaacatggtgaaaccccgtctctactaaaaatacaaaaattagccgggcatggtggtgggcgcctgtaatcccagctgctctggaggctgaggcaggagaatggcatgaacccaggaggcagagctttcagtgagccgagactgcaccattgcactccagcctgggcaacaagagcaaaactccatctcaaaaaaaacaaaacaaaaacaaaacaaaaaaacaaccaaaaaaaacaacaccagcatgaaccatcatgacaggtcaattttgcctttttaaagaagaaaggaaaataaatgttggaaattttcaaaatacaattaagccattttagagttggccgaaatttaaagataatctgggtaatagggagattgagaccaaacaggttaattaagaagcttggtcaagattgctgggttagagatgactgccctactgaagctagacattttttttggaaaattatttcagattattttcgatcaaatcagaataatgcatattaagctaagagcagagaacaaaataagaattctgggtagggcttttctgagggagtagaaatgttgatgtctagaaaatggggaacttgatcttagaagttttaaaatgaccaataattgttaccaaatttttaaatgtactttcaaaatggtttattccataaaatgaaggccttatacatacagtaagcatatgtgtatttctaaatcgtacatttattcaccttaggtttaaaaggtaaatgcagtgattttcaacatttttcttaactttattgcagctactggtcagaagttatatgtaaggctctttcaacgtaaattaagctggattaagatgaccaaattagagtatgaagagattgccttagacttaacacctgtgattgaagaattgacgaatgcaggctttctacagacaggtatgactagtagaaggagatgtgaaatgaaaatatgatctgaagaactgagcttctgcagaatgatggcagtattattatggtgccctccccggggtggtgcctggtaacttactgttttttaattgaatttttaatcttaggacaacaaattactcatgtgatgctaaagccattcttagcctgagttaagaatactagaataatgagagatggtctgctgctgttttcttgactgtggcaggtttagaatgaaagtcacctgggcatagacatgggtgtgtgccacagaagaaatacatcccggccgggcacggtggctcatgcctgtaatcccagcactttgggaggccgaggcaggtggatcacctgaggttgggggttcgagaccagcctgaccaacatggagaaaccccatctctactaaaaatacaaaattaggtgtggtggcgcatgcctgtaatcccagctatttgggaggctgaggcaggagaatcacttgaacccgggaggctgaggttgcggtgagctgagattgcaccattgcatttcagcctgggcaaccagagtgaaactctgtctcaaaaaaaatggatacatcccttcttggcgctctccttccagcaagagcttgactcatcttactcagagtcctcttctttatgatagaataaagctggttgtttgaaacccatattgcctctaaaaacttcatctgccccccttgcacacacatacagttcttcgattatgttgattgccttaagcattgttgaattgctttaagcctatgtgaacactaaggagagtctatcttctgcagtgatacccttcgttgtcttgtcagtagcattcgttaagtacctacctatgtattgggtacaaaattgtactgtattaggaaagggaaatgtgagccttgggttcaagttgctgacattttagaccaaaataagcgaatcagccagctggtttctttggggcagagtttattgtggggagcagtaagtggggatgaagcgaagtgagcaggaagtgtgttagggtggggctggatggcgtgggatggggaaagttgcgggagaggcataaaagctcagtgaaggcgcttggttgtgaatggttagtggtgggacacaggaccctctgcagagcagcgcttcccacacatcagtgccagcagggtcacctgggaacttgatactcagtccccacctgacttggaaaatgtggtgcagcttccgtaaattcatatgtctgacaggcatgccaggtgactgctgcaggtgagccttgacttaccttcaaatgagcaacaaaaccaggatcctagtggctcaccgtggcactcagtcaagtgcaagtcccatccatgctccagccccatggggcctggctctggctgtccctctcgctttctgccacggccacccagccctcagtgttcttcaccaggatgagtgcattcctgtctcagagccttggactgactttcccctccacccaggtcagtttccaccacgtggccacacggcatagttctcctttccttccccgctgcgtggtgttaccttgtcaaaggtttgcctgactactgtgtgaaatacagccagcctcctgccagcttcagtttgcctcctgagttgtgtttttctttagagcggttattaccacctgataaatttgcctattcatttaattgttacgctgggaggctagctcctatggatgggatttctttcactgtagcatgcccggggccttagaacattaccaggccgacagtgtacacccaataaatatttgctgaatggaggaagaaggcactgccctaaacttgtgaagccttgaaggcaaagaccagcgaggtctgactgagccgaattcctaggccaaggttggtgtcggggcccacagtagccgaacaggctcacgaatgccgagtgagcaggagaggcttgtgggaagaagagggctgatgatcagttctctctgacctggtttgagaggtcccattttgtaggggttttgtgacgagaaaggcagggagtatatattccaagcaggtgttgagatgcccaaaccataatggctatccatgtgtgtctttattttagttatgttttcctttagattttagtgagaaattctattatttgataacttttaagagatataataatagtgttattaatacgttaataataccatgttaataattccacatttaatgattggtttggccaactaattaaaattttcttagtagcatttcattttattttcatctaactaaggtaaataaagctagaaaatagtaaaatttaaaaaaacttttttttttaaccatttcagaatctgagttgcaagaactctctgaagtgcttgaactcctttctgctcctgaactaaaatccctagccaagaccttccacttggtgaatcccaatggacagaaacagcagctggtggacgcctttctcaaattggccaaacagcgttcagtctgcacttggggcaagaataagcctggaattggtgcagtgattttaaaaaggttttgttggctattgttacagtaaaaacatttaaaatgttgatagcacatattaacttacagtagattgtatacttgattgaactgtaattgtttatttcagttgtagttagattgagaaggctggaaaagccttaattgcaatagcctggattctttcttgggttattattcaaaatttttgtcgtaataccgtactaatttccaggaccaagaaaaatcggaaggcaataggcctttggtaaattgtagtattttattttccgagaaaaatacagttttaagtgattcttatgggattttaaggtaaactatttagtcaaatttttattttagtttttgtttactaaacaaagtataatcaggcagtcttaatgtgcaagttttcctgagtttaaacgtaacaatttaccaaaaactgtgagtggcttcttttgtccttgagaagcccttgacctgtttcagttgaaaattacaaaaacttttagaattgatttcttttgcccatgttatttatataatcaaactatatcaactctagcctgggaattcactactgtggagtcgaggatgaaatgagaggatgcttttgaaaacactttaacatgatgttgttatttattttatatatttgttttgtatatttcagttgttatgagcccatccttgttggggaggtgctataaatactaatctttaatgaaacataggtgtaataaggcagacattaagaaaaatataaataccaacacttgaaaaaagctcgtgttatagatttttaaaaagtacttcaataaattacatacttgtaattaattgacttgagaagtatagaatcctcatctgtgtggtatgttaaatgtcttctaagtcctttctttatctaattgtatttcttaagtatttgatgttaaccttatatgtaacattttataagcaagtaaacattaaatttagccaccctctggctgggcacagtggctcacacctgtaatcccagcactttgggaggctgaggcaggtggatcacaagatcaggagttcgagaccagcctggccaatatggtaaaaccctgtctctactaaaaatacaaaaattagcctggtgtggtggcaggtgcctgtaatcccagctacttgggaggctgagtcaggagaattgcctgaacctgggaggtagaggttgcagtgagctgagatcgcgccactgcacaccagcctgggtgacagagtgagactccatctcaaaaaaaaaaaaaaaaatagcagccctttcttggtatatgcacttagcatagaacagataaagtaaataagatgaacatattttatctctaactttggacttgtaggaaaatagaatcctcaaggctgttttagttctagtgaaaaccactgtcctttaaggttgtcctttatttcttcattctgatggtaaagcccagcagtggaatttcagagtccctgccagccccacgctagggcagcgcctggtgcttttactctgctgttatgataaagaaacagaaacagccacattattacagaaaaaggcacattatttatgctttcttaatccttgcaggagtcactgcttagttttctgtgtttaatgcttccttttgcagactggaggctgtgtccactggggcatccccgggactctgcgtggaggtggatgaaatgggtactttggggcagtctgtagatgagtggctctcagttcagtggtggtgtgataggaatcccaccccttccccttcaactccatgatggtggcactcatctctcccacaccctctgggatgcagtgctgcttttggtttaatagcttctgcaccagaagggtgtgacatctttcactagccaagtggttctcaactgggggcatctggcatcatctggagacatttttggttgtcagtactggaggtggtgaagctaatggcatctagtgactagaggccagggacagggcactgctgagcatcctataatttacaggacagcccctgacaacaaagaattacctagcctaaatgtcaatagtgctgaagctgaaaaaccctgctattgatggtgtctaagctgctagagtcagagggcccacatggtcctggatttaatttagacctccaagcccaccttgcagacatccagagttgaactgaattcactccaatgttatcctagaatagagatgctgctggaccattctgtacactagagaaggggtctgcaacccccaggccatagaccgataactgtccattgcctgttaggaactgggccacacagcagaaggtgagcagtgtgccagagagcatgaccgcctgagctttgcctcctgtcagatcagcagtggcattagattctcataggagtgtgaaccctattgtgaactgcgcatgcgagggatctaggttgcgtattccttatgagaatctattgcctgatgatatgaagtggaacagtttcatcccgaaacacctccctcaaccccagtccatggaaaaattctcttccatgaaaccactccttggtgccaaaagcgttgactgctgcgctagagaacagcaccaaactttggcatatacatttgcaccacgtcttggtacacaaaatctgatgttttacctggagcctttgataatgacattttaaagaaataccattatttaatctaaatcatcactagaataaaaaattgagaattgcttcatgttgactaggcaatacttttctgaaagttttcctggtatttgaagcactcatgaccagggtaaaccccaacctactgtgcagccgaggaaggaagcacttgtatggagccaaaccatgtgtggaaccatttggagatgtacattcatttactcctgtgtatccctgggtgagctctcagccccagagcagttaagtaatgctccagtgtttaaaatagtgaatgtcatttctctttattttagatgaaaataatttgtaaaatctgacatccaaatgcttaaaaagctaaaagttatttctacattgtacatttttcagagccaaagccttggctggacagtcagtacgaatctgtaaaggccccagggctgtgttttcccgcatcttgctactgttttcgttgaccgactcaatggaagatgaagacgccgcttgtggaggtcagggacagctttcaacagtcctgttggtcaacctcggccgaatggagtttcctagttacaccatcaatcggaaaacccacatcttccaagacagagatgatcttatcaggtaagatgatgttagctcactataatgtctatatgtgtatttcacaatttagtaaaaggttttgttatttttttccagccaaagtagaaacattaagtccacagccaaaacagtttttaatctttttttgccccacttgtatacatttctatgactatagggaaaatgtagaagtgtgctgagattatggttgccaaaatccaaggaattttgagttagaactacaaaaacttctctggtttatgtttccaagtacctttggaagggagtattttttgtttgtttgtttgtcttaatttgagacaggatttcgcccaggctggagtgcggtggcatgatcaccgctcactgtagcctcaacctcctgggcccaagtgatcctcccacctcagcctcccaagtagctgggaccacaggcacatgccaccacactcagctaatttttgtatttttttggtagagatggggtttcaccatgttgcccaggctggtctcaactcccggactcaagcaatccgcccaccttggcctcccaaagtgctgggattataggcgtgaaccaccgccctcggcctgtattttttttgacacagacatattaacaaacttgacttaggaatatgttgttggcatgaacaagactgaatgtgaatattttcttattagtaacactttaggtaaagctattaataacttgtatattgtatatcatacatatgataattagatatacagatgataaattagaaattttcactaatttatattggcacacggatttagtgaaaatttggtttgtccaataaaagtagattttgaactaaaagtagaactaccatgtgatccagcaatcccactactgggtaatatccaaaggaaaagaaataggtatattgaagagatatttgtactcccatgtctattgcagtctattcacaatagccaagatagggagtcaacctaagtgtccatcagtggatgaatggataaagaaaatgtggtacatatacacaatggagtactgttcagccataaaaaagaatgaaattctccatggtggcaacatggctgagctcagaggacattatgttatgtgaaataagccaggcacagaaagacaaatactgcatgttctcactcatatgtgggaggtaaaaaagtggatctcacagaagtagagagtagaatagtggttaccagaggctgggaggggaagggggatagggaaaggttggttaacagatacaaaagtgcagctaggtagaaggaataagttctgttgttctgtagcagtgtaggatgactataattaacaacagtttattatatatttttaaatagaagaatggatttagaatattccccacacaaagaaatgataaatgtttgaggtgatgcctggtatggcaacacatgcctatatttctaactactcgggaggctggggcaggagggtcacttgagtccagaaattcgggactagcctgggcaacataatgagaccccatctctaaaacattttcaaaaaagtttgaggtgctggatatgctaattaccctaatttgatcattatacattgtatacatgcattgaaatatcacactgtgccacataaatatgtgcaattttatgttaattaaaaataataatagatgccaaacaaataatgggattacagtattaaaaagcaggttttgataagaaagaatagtgtaggtcttaggaaaaaaaatttggatttccttaaaaaaaacacctttggtaagaaaaattaatttggatttcctaaaatgtcacttttgattcttgatttggatttctgactcaaatttaaccaaaattgattgtgatatttgcttttaggaaagtcctgtgtttctaggaaagccaggtgctttaagaagtaagttattgaaatttttgaatcacagcagtgtcagtataatctgattttggcccattttaccttagctgtcaggaagctcagtatcttatttgtgttcaatgggaataacttttttagttaaaatctctaataagactgtttattcttaccctgttttcagttgtctcatatcttttttaccttttttgtttttactggctttacgcttttctggcttgtgagaatgtatactctgaagccaagttccagtttctataccaatgaactgtgaacccaccctgtgcctcagtttcctcatctgtcaaatggggagaataatagtatattcttacagacatgtgtggggtgcatgggaagtgcttaaagcctgggctatggggaatgcctactacatgttcattattattttaattgtcattcttactgttatacccaagttctatgacaaaaccatggttgacaagttcaaaaggcatctcatattctttctagaaagtaagtgtgctgtaaataataaaaataatgagaactcccttggttaagcagagagccttaagatgtaaatgaaactggatttaattgacttctggaaaggtaatagtattcaatatctggtaatgtgatacctggccaggaaacccttgttgtctacctctgtacttgagataatttatccttttaaaatgtttcttattcattcagtacaaatgagtgttgagtaccttttatgtgacttggttaggggttgtagcagtgaacaagagagggcctcagccatcatggggctatgtttcctggggagatagaaattaaccactatttaaagtgtgtgagaagtgctgtgataattgagggacaggctggataagttctttatagacagagtggccctggagaggtgacatttgaagtgggacttgaggatgagaatgaggtagctgtgtcagggtctgggtgcctgcgtcccggccgcgagatagcatgtgcacaggccctgaggcaggaaagagcttgctgagttggaggaactcaggagacccctggctaagatgtgggggtggacaggactgggttgttggtagcggcagtggagagaagtgaatgtgtatgaggcagtttggaagcagtaaagacaagacttgattctgatgtgggcgagaaggtgaggagtggatcaaggatggctctggtgttttgccttggggtggggcgccatccagtgaaggggattgggagaggtgttggtgctggaggcgtcagtgtgtggggtgctcttcagccgtttggttgaagctgttgtgtgtggcattggacttgcggtcaggagctcagggaatgggtctggcctggaaaaagtcaacattttgagagtcactggcatatggacaatgtttgaagccatggaactgaatgagcagcatattataaaagaatgagatctaagaatttgtgagcaaacttttacatttggaggcaatttctttactcttactttacagtgtttgtacataatgatattatgtacttcatgcttttcttttagatgtgagaccaaaatacaatgaacatgtactcaaagtgttaacagaatttgttggtcaaatgtctttgttttttggtagctaaaggagcgatgaaaaattgtctttcttaagctaagttgtgttgtaacatttcagcgttgccatctcccaaagagcatcccttagttattttgaaatattccaggtaatcttcttagcttgggcagcatccctctggctagctctgattgtaaatgattaaattatcagatctacatctgactataattctgatgtcacttacatgtttgctgtcatattgttgaatgagtgaatggatgaatgaatggatgagtgccaaaatcaggaatgatgagctgatccatatcacatttatagaatggaacatgttatgtgataatacagcataaatgtttttatctttctagttgggctttcttatcagttctgggccactccagtgatttggttaagataaattattattagaataaaatttaagtggccctcatattttaaaaaacacacttttacctttcagagtgagatctagtggctaggatgtggtcattctatgggaatgctcattcttatttggaacttggatggcattttcctccagatatgcagcagccacgcacatgctgagtgacatttcttccgcaatggccaatgggaactgggaagaagctaaggagctcgctcagtgtgcaaaaagggattggaacagactgaaaaaccacccttctctgaggtgagagtttttctaggtacctgccaaaatttatacattgaccaagttgttcccaacacttacagtaattttcttcatgaagaatatactcctttttctctgtggttaaaccagctgtggaattgaattttgtgcgtgctttgcctagaatgaaagtgctgtgtgaaatagaaggaaatgtctgaaggtttaaagtgaatttgatataactcagatccctgggcaacacacatgccaaccccatacttgacttgtcgcatgccaactgtaggagtgttggcctccctgagtactggtgagctgaactgaaacgtgagggaagccagcagcaggacggatgtgggaagcatggtaggtgggttcctctgagggaaattcaagtaggtgttaaaaactctgcaaaagacagctcaagcgaactttccaggtacacagcacatgatcttttattttgttgaaaatggtaaacatcttcaatatttattaagacattttttcctttgttgttacatagtgatgagaaaaattagtattttcagatgccactttgaaaaaatcatttaggatatacagttgacccttgaatgatgcaggggttggggtaccgacccctcagacagtcaagaatctgtgtgtaacatctgacttccccactacttaattaatagcttactgttgactggaagccctaccgattacatagtcaattaacacacattggatatgttatatgcattatatgctgtattcttacaataaagtaagctagggaaaagaatatgttattaaggaaaatcataagggggctggtacggtggctcacgcctgtaatcccggcactttgggaggccgaggctggcagatcacctgaggtcgggagtctgagaccagcctgaccaacatggagaaacctcgtctctactaaaaatacaaaattagccaggcctggtggtgcctgcctgtaatcccagctactcgggaggctgaggcaggagaatcacttgaacccaggaggtggaggttgtggtgagctgagatcacgccattgcactccagcctgggccacgagcaaaactccgtctcaaaaaaaaaaaaaaaaaaaaaatcataaggggctgggcgtggtggctcatgcctgtaatcccagcactttgggaggcagaggtgagtggatcacttgaggtcaggagttcgagactagcctggccaacatggtgaaacctcgtctctactaaaaatacaaaaattaggtgggtgttgtgacgagtgtctgtaatcccagcctcggaaggctgaggcaggagaatcacatgaacctgggagacagaggttgtaatgagctgagatcgcaccactgtactccagcctgggtgacagagcgagactctgtctcggggaaaaaaaaaaaaaaaaagaaaatcataaggaagagaaaacatatttactgttcgttaagtggaagtggatcatcatgaaggtcttcatccttgttgtctttacagcaaataggctgaggacgaggagagagaggagggcttggtcttgctgtctcaggggtggcagaagcagaagaaaatccacatataagtggacgtgtgcagtttaaacccatgttgtccaggggtcagctgtatatttatagagaaataatattgacttaaaaatcacaagaagttagattactataaacagaggttgataaacttctgtaaaaggtcacatagtgaatattttaggctttgcaggccatatggtttctgtggcaccaactttactctgctgttttagtgcaaaagcagccacaagaagtacgtatgcaaatgaatgagcctggctgtgttccagttaacttcatttgtggacattgaaatttcagtttcatacaattttcgcataccaaagtgtattattctctttatttattaacaatttaaaaacataaaaaccattcttagtttgcaggacatagaaaatcaggtggcagaccctgggtttggctgtgggccggagtttgctgaccttggtttagaatgatgagttctcatcttactccactgtctgagtgacctaggacgtggtagctggctgtgagaatgtaggtttgtggtgtagaaaattgtacacaactgaaagtatttagaatatacctttttaaaagataggaattcagtctgctttgtcacttgttattattgtcttataataaattaaccaaattattaaactactggtatatgtcttcattttagatgccacgaagatttaccactcttcctgcggtgtttcactgttgggtggatttatacaaggattttgtctcggtttgtggaaatactgcagagacttcacatgtatgaggttagagcacaggtccctgccccccaccattactgatgtgatggcgttaaacatgtgaagggacagctgtcgggctctcagcatttcctgcttatttggttagcacacagtaatataatggaggcatatttgttttgttttgtctttttgagacagggtctcactccatcacctaggctggggtgcagtggcagggttcagcttactgcagcctctgcctcccgggctcaagtcatcctctcacctcagcctcctgagtagctgggactacaggcgtgcgccaccatgcctagctaatttttgtatttttagtagaggtgagatttcaccatgttgctcaggctgatctcgaactcctgggctcaagtgatttgcccaccttggcctctgatgctttgacagtgggggcctaaagtgttgggattacaggtgtgagccactgtgcctggccaacgagggcatagttaatgtaggcagcccgctgtctcttggattagtagagagaagataggtgaagatggacagctgttctgtttgcctgtgtgttgatgaatctgtgtcccaggatggcctgggggtggcggccaccatcctggagggtgccccacaggtctgcagcctgagcctgagtctctttcagaactccttgtgagacttggcaggtccccagaaatctctgagggaccttttgcttccttttgcttccctgtcagctgtcatggattgtctggagacaatttataatcacaaatcagaaatttgtcgtatcctaaactttgtgaaattgctagatttcacttttgttgtgtttgatatttctatattgaaaatgttatctccagaccaggcatggtcaaaaatatatatatacaaaacaagaagaaaagaaaatgggatcttacaaagaggatgtgctaagctggtttcttggcctggggtctgtgaatcccaggggagtgatgggtgggctttggggaaatctgtgaatctcaaacttgcatgtgtatggggatttatgcatttttctggggtaaatcattccatattacaaagacatccatgagccacagaagattaacaaacagaatgaccgaacagtctgtacataatctagaccagagaatgttcctgttgaggtagggtgtttgtatgaggacacccctcattactttcctgcccaccccaaatccctcttgcagttggtcctgtgacctgctgtgttcccagaagtatgtgggtttgccaactgtgaccagtgctcagctgcctggaacttgaccctgtgcgactctgcactggttgactggtttgcagataacactctgcagcactcacagatgtctgtaccccagtgccagctggcagggaccgggtgaagagtgaggatgccttagggaactcatgcccactccagaaggcacctcaaagtccctgtcctgtcagttcggggtccttggcctcattgtagaatggaaagatacgcattataaataggctttaccaatcctatgggcttgtaaatatcattgcagctggattttttgtgaatctaatgaggtttctttgttattgttgcaataggaagccgtcagagaacttgaaagccttttgtctcagagaatttattgtcctgacagcagaggccgatggtgggatcgactggcccttaatttacaccagcacttgaagcgcctggaaccggtactcagtaacaaaacatatctgaaacaccttttcattttagaatcaacttttaaaatatggcaaacttaatgccttaaaatttacatgtaattagaacatgtatttcttttgttaacattcttcttttgtctgtgttcttccaaccccaaaagaataccagggatgccagcacagcatgagcatagagactggaagcttttgtcttctctttgctgattggcgagatgggcttactgtggactctgtgctggcatttaggaatcaggatctaggaattaagggaaagggagagtcagatgactcagccgtcagcaagtcagcaagtgccttcaaggaaggtgtttgttttggaaatggtgactttgttgatttgtagcacagggtctctaggtagaaagattggcgagaaagcgttcctttccctatcttattgcaggtcctttatgcgtgactctgtacttctgtgaggtgttttgctctgccatttggaagcgttgtttgaccttgagcaggcaccagtgctccctgtggtggcgatctaggggcacttggaagcacagggattctgtggccaccacagccaggcgggtgaggccgcagagcctgtgcctgtgggctaggcagcaacagtggttctttgtgtggccgccagcaggcccctccctgtctctattccagccctgcatttgagttgaatggaggggactgtgcctctgggagcttttgattttttcagtggcccattaagtgaatcagggtgatgtaggggtggaaaaaaacgaccactggttaggaaatatgacatcttgtttttattgccgtaaactgaaaaagtgccttgttacctcacgtatcagggaaagagccagtaaagctatttcctctcatggaggagggtgtggggcttccttaccactcggtgtttactgaggctgaaatagcaagagaaagcatctggtagcctagaaccaaatacagaaggagaaagcttgtgtttctgtcgcctttctttcaatgaaataaaagttcaagagagtacagatttcccctctgttcacagttctgctagggggtagacaagccactgagcttatttttgagatttgagctaagcctagttcctcctaacctctgtttccagaggtcttactggccatagctcttgttatttcattagtgttctttgatctttacctcagtctccagggaagggatcgcctagctgagtgctaattcctgcaaagtgctctgcagccagccccggcctggccagggcagaggtggagccagctgggccctccctctccgaggccaggctgccgctgcccggcaccgtcttctgccagcgaacagggtgcccttcagagtctcattctcccatcttcatttccttcagccactcaactctggatggcctgagccttcactgattttcaatttcttggtttttattttttctttcactttttatgtttctattgtggtaaaataaatttaacatccctaaaatacagcattttagccatttttaggtgtacagttcagtggcattcatggtactcatagtgttgtgtgaccattgcctctccacttaccactccaaacagaaacactgcagccattaggcaactacgccccgctttcccttccccaagccctggcgacgacgtctcatctactttttgtgtctgtaaatgtgcctgttcatttcattcatttcattgaagtggaatcctacgatatttgtggttttatgtctggtgtattttgctcagcatcatgtttctgagcttcacccgcatcgtggcacatgtcaggactccgttccttctccaggctgaacacacttccactgtagcatctgataccacatttttctagccactcattggttgatggacactgggttccttccaccttttcggccattttgaagaatgctgcatgaacctctgtttcagtccctggtttcaattcttttgggaatacctgagagtggaactgctgggtcctgtggtgattctgtgttgagctttttgaggagtggctgaactgtttttcacagtgtttacaccagtgtcacattcccaccagcaatgcgtgaggtttctggtttctctacctccttgtcaatgcttattttccatgtttctgattatagccatcctagtgtgaagtggtatctccttgtggctttctgtgtttgtttatttgtctgactctgaatcgccttgggaaatacttgtaattcctccaaacctttggctcctgtccctgtaaataaggaatctgaagcagctccatggttcttgactgcatatgagattgacctggcgctttgatgtggcccccatgcgtgggctcctgctctggaggttctcattgtgtggatccggggtgggacacatgttttcctacaaagctgcctaggtgatgtcctgagaaccactgagctaagttttcctgtaaagtcaggtacccctgaggttcacaccctttgtgaggggcagctgctgggatccactgtccacctggattacagcccggtcacgctccagcacgttgactgtgaaggctctggttgccagatgcattgaaatcctcagaataagatctaaggaaacagcctaaatctctagaagtgctgtttgctcatttgctaatcagcaaaattcaataataaacagtgggcttttctgtcaaactaaatgcatggaagccgccatgggtttttttaggagcctgatgtgtgaccatgctctctgccagactatcaagtgcatcacagaggggctggcggatccggaagtcagaacgggacaccgcctttcactgtatcagcgagccgtgcgcctgcgagagtctccgagctgtaaaaagttcaagcacctcttccagcagctcccagaaatggctgtgcaagatgtgaaacacgtgaggaaagagcctgtgggtgctttggacttaggcgcgtgtacctggtttttttggaccagaagcatcctaagagctgttttgagtgtgtgttttcttttagactcggaataatctaaaactcgttttggacggctgtgtggccattgctcccagtctccccctaacgccctcctccctgaggagactgggttgcttggtgtggtcacaccctgggttgagtgacagatctcctgaatggggcctctcagcatctgccccggtttcatttactcactggggacctgtagagcagttctggtggttgaggctctcccagggccggaccagcgaactgtcacatccccgcagttctgcgtgtgtgagccccacgctgtgtgctctactaagtgactgactttgtggtaagggaggtcaatcctcacgatgctacaggcaggttttcagggacttttgctgacctgaggctaatagatgttattctgctgctgtttcaggtgaccatcacaggcaggctgtgcccacagcgtgggatgtgcaagtctgtgtttgtgatggaggccggggaggccgctgaccccaccacggtcctgtgctctgtggaggagctggcactggcccattacagacgcagcggttttgaccagggtaactgagcaggctttctcttgtggcacccagccccgggtggacgagcagcagcactggatgggctgtcagcagtgggctgctgtcctctctctgtcctctgctcacagtggaagatgctgtgggctgggggatgtcttcctattcttccccttatcaatgataaggagtaggtcaggggtagttgtcccacagggcctggctctgatcttttttcttttataaaaacttataaaagttatggaaggtactgcacaagcctttgtacagaagtcagggggacagtgtgctcaaccccacggacacccacttccattcagtgttccttctgttctctcctgccccttccctgggattttagaagctggccccagatatcctctcaggggccctgcggcccatgctagtcgctttcgggaacagccactgagccttccgcccttgggcctggcaggactctccctgtgcccgggctgcagggttaccagtgttaaaaacactgatattttcagatgtgtgaaaatcaggacatgatttcagtattccccgagtgttcggaagattaacaagtactatagaaagacaaccacaagataggagtttacaaagcccaggttctttctgatgagtgttgagattcatctacataatatctttattacttacagggaagggtgatgttattggggaagacgtgcaaatgccagtgaagacagagagatacagtaggcctgaaatggttagaaatagaagaatagaatgcacattcaaggccccgagagacgtggaaactggacactcgctggaggaggaagcaggctgggacgtgggagcgctgaaatgctttcagttgagccatgagcctgaaaaacacacgattcctttcccagagtagaaactatttttccctgattaaaatcgatgccgtgaaactgggctgaactctggctgccaggctttatgccacagggaattttgtgtcagagcgatctcaacctcttctgggaggtgatttctgaagtactgcaccaaaaatgatttcacttataacacaaatgcacagcatggaccacttaggagttaaggaacgaaccaggcacggtagcttacacttgtaatcccagcacttggggaggctgagacaggaggatcacttgaactctgaagacggaggtgggaggatctcttgaccccaggaggtcaaggctgcagtgagccaagattgtgccactgcactccagtctgggtgacagagtgagaccctgtctcaaaacaaaacaaacaaaggagttcagaaatgatctggcctttatattcctgcctgatcgtcagtgtattcaccaggacggaacactgactggaaatcaggtcctagctccactcctggctgggaaagagcatgaagtgttctaggaagaaaagtcctcctggaagacttggcaacagccaggagtcctgagtgaaccgctgtccttttgaatccctgagacgggctgcagggatgaggggctagaactgacaggaagacaggacagagagcagcacagcctcagaagtgcaggacagaggtgacccaggcaggcatgacgggctgtggcttcctgccctctgctctcacagcacccctgatcccactcactgtggtaccacgcagatgggttggggcctgtaaatgtcaggtgggaccagccagaggagctttgctgccagtactggcatgtcaggatgggggtctggtggtcagcacctcctctggccagtggtcttgtggggagaggcatccatgtggcctcctcctctgtcgggagggctgatgtgcagagaagtacggacttggagggcagctggatgagctggggcttgctcagggacacaggtctgtgtgttgtgccaaggctgaccccctcatcccacaccagaccctgcctctgactctgtgacctcagcacctgacttctgtctctcaggtcatctcccagtcagtaaaacatttgtgtgacgtgaggaggggcactgaagtgggtgatctttaaggccagatgtctctgtaaaagccttgactatcggaagcactgggctagggcagtgtagtacccagggggatgaggtgcatcagagcagcacctgctgaggccaagaacggaggtggctgctgccggcctccgggaggtccccttagggaagcatttcttcaggggtggcccagggacctccggcatcagggcctgcatggggattctgtgccagcccagccctgctaagtcccagccttgggaacctgaggagggtatctgcctatttttcttttaaacatgtttcttaggttattcactaaagtttgagaaccactgctttgtggctttgaaatgttcatttgaatttttctatgattactaagatttttgcccttaaggctctgtatataaacaacatactgtataaaataaactgggaatggcgtgaaaacagcatttgcttctgaatctaaaatatttctattattttcttgaaattgagtgtgcagtaggttatggtggtgttttggaagaaacagataaaacagattttgtgtgtgtgtgtgtgtgtgtgtgtgtgtgtgtgaccttgtcttagggattcatggcgaagggtccaccttcagcaccctgtatggcctcctcctgtgggacatcatcttcatggatgggattccggatgtcttcagaaacgcctgtcaggtactccagtgcccctgccccacgagtaggtccttctgcacacatccgtggctcacgcccacctgggcaccgtgtgtccacagccagcagaaaccatctctgttacggtcctttgggtcatccacaggtcaagatgataacttattttaaaaatctgagtaatagaatttaagatgtaagtatgtgaagttttaaactttaatttagcctccaccttacatttagacctttcgtataaagtaccatcagcatcagccctcccgagcacctgccgtgtcgcaggcactgtgccaaggagctcacagacatgggcacatctgcctgttcagaggtccacccagctaagcgaaaagctgtttttgcaaattattactctaaaaaacaagtttaataaattgcttttatatcaattaacttttacttatcttttgagagaaagaatgtatcggttggccggtttccaagttttgtatgtactgactagtcctctggtgaacacggctctctgcaggcacagtatgacagcttgctttccctgtgacacaggcattccccctggacttgtgcacagacagcttcttcacaagcagacgcccagcccttgaggccaggctgcagctgattcatgatgcccccgaggagagcctgcgggcctgggtggcagccacgtggcatgagcaggaaggcagagtggcttcccttgtcagctgggatcgcttcacgtctcttcagcaagctcaggtaatggttcacctgcatggcaggatttgctcagaaagttaacaccgccccagtgctgtcttttcagcaactttatcaaaatacacatgtgtgtatatgtaaatacatgtatgtgtgtgcatatatatgatatatagtatatatcatatataaaatatatattatatctttattatatttattatattatatattatatattacatattacatatataatatatattatatattatacaatatacaatatataatataatatatgaaatatataatatatcatataatatatataaaatatatattatatcatatataatatatataaaatatataatatattatatcatatataatataatatataaaatatataatatattatatcatatataatataatatataaaatatataatatattatatcatatataatataatatataaaatatatatcatatataatatatataaaatatataatatatatcatatataatatataaaatatataatatatatcatatataatatataaaatatataatataatatatatcatataatatataaaatatataatatataagatatcatatataatataatgtataaaatatataataatatatatattaatattatataaattatatatatgagaataccctatccccctggccccaatgccactgttagtgatggaaacatactagggtgttagaaaagccccagctgtgcctttgccacccctgagttgacagctttcttttgcttgccctgtggctgaggcagggaggataccttctgtgttccttcaactgctgccctctatgaggccatgctgtcgcgttcctgagtgcatcctccacatccctcttcctcagcgctccccagcatggccacgctggcagaagcctggaaactgaccacaggaggaccagtctcccaccacttgccagtgggattccagccatggctctgcagctctggtacaagcagcagaacagcgcatggtgggcctggggtccatgtgcactgaattacatatacactgagcttttctccgtctcgtgatccctggagcctatttccattctctgtcacgagggaagtggctaactgtcctgtgttttgtgttcaggatcttgtctcctgcctggggggccctgtgctcagtggtgtgtgcaggcacctggctgctgactttcgacactgtcgagggggcctccccgacctggtggtgtggaactcccagagccgtcactttaaggtcagttgaggcagaatggaaagtcctgttggtaaccttattagcaactgaatcagaggccacaagtaggcatttcttgagtggctgttggcaagattgaattccttgagagcttttgggccgagggcctgggttcctgtgggcctgtcccctgcgactggcttcatcagagcaggcgggtgagaggagccccagagtgtgagcaagacagagctccatctcttatgacttgatgtggacatgatgttccatcactcctgctgtattctgtggttaggaacgagtctctagtccagctgacactcaaagggagggggtcacaacgggtgtggacaccaggagctattttagaagcttaccgataattgtacattttaaaatgacttaaagagtataatggtttgtaactcaaaggataaatgcttgaggggacagataccccattccccttgatgtgcttagttcacattgcatgcctgtatcaaaacatctcatgtaccccataaatatatacatctactatgtacccacaaaaaattttttaaaaagctcagagagtgaacacttccttgaacgctgtccactagcccagccctgctgcccatcactggtgatttgttttctcattattgagttttgagattaaaaaattatatatcctggatacaagtcctttatcagtgacatttcatcccagtctatggcttgtcttttcattttcttaatagtgtcttttgaagagcagaggtttcaaagtttgacaaaatccaacttatttgttctctagtggatcatgcttttggtgtcacatgtcagaaatacttgcctaatccaaggtcacaaagagtttctcctttgttttcttctagaagtgttatagttttaggttttacattcagttttatgatcatttgagacgccatttgtatacagtgtggggcatgcactggaattcatttgtggtgtgtggatatccacttgttccagctccatgtgtcaagaagaccatgcttcctccactgaattccctctgtatctttgtcaaaaatcagtaacccatatatatgtgggtctgtttctatatactcttcggttccattgatctgtttgtctgtatttcttgattattgtagctttagatacatcttggagtcaggtagtgtaagtcctataatgacttgtttttcaaagttgttctggctcttttgcatttttatttgaattataacatcaaattttaagtttccaagaaaaaaaaaagccagctgaggccgggtacggtggctcacacctgtaatcccagcactttgggagacagaggtgggcggatcacgaggtcaggagattgagaccatcctggctaacatggtgaaaccccgtctctactaaaaatacaaaaaattagccgggtgtggtggcgggcgcctgtagtcccagctacttgggaggctgaggcaggagaatcgcttgaactcaggaggtggagcttgcagtgagccgagattgcgccactgcactccagcctgggcaacagagcgagactccatctcaaaaaaaaaaaaaaaaaaaaagccagctgagattttaattggaattcctttgaatctgtagaccaatctgagaggaattggtatcttaacagcattattttgatcagcaaaaatgggagttgattttgtaaaatattaagaatttttgcatatatgttcatgaaggatattgagctgtacttttcttttcttattatctctttgttgggttttggtttcagagtcataccagcatcagagtgggatggaatagttggtgtagaattagtattattccctaaacatttgatagaattccccagtgaagcagtatgggcctggagattttggggggaggaaaatttaaagctataaattaaatttatttttaaacaacataaggctgttcatattatctgtttcttcttgattgcgctttgctagtttgtgtctttcaaggaatttgtccatttcatttaagtattgtcttaaagttgtttatatttgtttcttttctttttttttttttttgagatggagtctcgctctgtcgcccagactggagtgtagtagcgtgagttagctcactgcaacttccgcctcctgggttcaagtgattctcgtgcctcagcctccctagtagctgggattacagctgtgcaccaccatgcctggataatttttttttttttttgtatttttagtagagatgaggttttgccatgttggccaggctggtcttgaactcctggcttcagatctgcccaccttggcctcccaaagtgctgggattacaggtgtgagccaccgcacacggccatgtatttcttactgtattttaatatctgtagaatctttatctctgtcatgctcttattcttgatattggtaatttgtgtcttttctcttttttccctaatgagtctggcaggaggtttatcaatttactgattttctcgaagaatcagcttttggtttcatttgtttttttatttcctagtttctcaaggtggaagctatggtgattgctttgagaacttcttttctaatagagttaggtagtgctccaaatttccttctcagtgctgctttatctgaacctcacaaatttagtagttgttttcattttcattcagttcacaatactttctgatttcccttttgactcttctttgatccttggcttatttagaagtgagtcatttacatttccaaacacttgagagattttcaggtatctttctgctattgatttgtaatttaactccattgtattcagaggacatattttgtatgatttgaatcccactaaatttgttgagacttgttttatggtccagaatatggtattccctggtgaatattctgtttgtacttgaaaagaatgtgtgtttagcatttgttgtgggcagtatttttaaatgtcaattaggtcaagttggttgatagtgttgtttaagttgtctgtgtccttactgatttcttatttacttgttctataaattattgagagaatattgatatctctgattataattgtggtatttcttttctttttttttttgtttttgttttttgagacagactctcactatcacctaggctggagtgtagtggcagtgcgatcctggatcgctgcagccttgatctcccaggctcaagcaattcttctgcctcagcctgttgagtagcccgaactataggcatgcaccatcatgcccagctgattttttttattttttgtagagatggggttccaccatgttgcccaggctggtctcaaactcctgggctccacgttggcctcccaaaatgctgagagtataccgtgcccagccaatttgtgtatttcttcttgcgtttctatcactatttgcttcatgtattttgaaggtctgttataagacgcatagacttttaggactgtcatgtcctcttcatgagtctacccttttatcattatgcagtgaccccccctttacacctggtaatctttgctctgaaatcaactttgtccgatattgtcaacatgtagccacttcagccttcttttttttaatgttaacatgatacatttttccattcttttacttttgacctgttttatcttatttttaatgtggatttcctgtaggcatcatatagttgggtcttacttttgaatccaacttaacctctgtcttttaatggggtgtttggaacatttacatttaatttgattattgatatccttagctttaaatcctgatacttattttctctttgtctcagaactcttttgtcccttgtctttttcctgagtagctggaaccacaggtgcacgccaccatgcctggctaatttttgtggtttttgtattttttagagatggggttccaccatgttgcccaggctgatctcaaatccccaggctcaagcagttcacctgccgtggtctcttagtgttgggattgcaggcatgagccacagtgcctggccctgtcttatttttaaagattgcatttgatagctttgctggcttgttagctgtaactgttcattgtgttgaagtggttgcgttagtatattatatatcttaaacttatccaccttcaggtgatacacactttagagtaaaaagaacctttcaataatatatatcttcccttccagcctttgtggtgttttcatatattttacttctacgtgttatatgttctataacatattatttttgctttctacagttgattaatgagtctgtatttactcatgtacatagcatttccagtgcttgctattcttttgtgtagatccaggtttctgtgtagtctcattctcctgcttgaagaatttcctttcacgcctgtaattccagcactttgggaggctgaggtgggcggattgcttgggctcaggagttggagaccagcttgggcaaacacagtgagacctcatctctacaaaacgataaacaaattagctgggtgtggtggtgtgcacttgtagtcccagctgcttgggaggctgaggtgagagaactgcttgaggctgggaggtcaaggctgcagtgtgctgagatcataccactgtataccagcctgggcaacagagtgagaccttgtctcaaaaaaaaagaaaaaaagaaaaagaaaaaatttccatgtctagaagttctgctagtaatgaattacagtagttagccctctgtatccatggtttctgcttctgtagatgcaaccatggactgaaagtatttggaaaaaagaaaaacaataaaaagtaactacaacaataaacaaatcaaataaaaatacagcataacaactattttcatagcatttatattaggtattataagtagagatgatttaaagtatatgagaagatgtgctagaatatgcagatgcgatgccattttatatcagggacttgagcatccatggattttggtaacagagggggtccttgaatcagtcccccatggatactgagggatggctgtatttaggttttgtatgtcttagcctttatttcacctttgtttttgaaagatattttctccgtgcaatgaattttatgttgacagttatttttcaatactttaaaaatattagtctactgtcttctaactagcatggtttccaatcagagaatctttttttttcctctggctttaaaaattctggctgctttgactatatcccctgattatacagttgtgatatttcctagggtgccgttacatttgtgtgcctgggattcattgattttcttcaatctttgggtttactgttttcatcaaatttggaaaatttttggccattttttctttaagtatttttttttctcgttcctttggggactctaattaaatgtcccttaggctgctaaatgctgtatttaaacaatttttttctatattttacctatagtttttattgctgtgtcttcaagtctagtgatgtgtagtgaacaaaacacacaattcttgccttcatgaagatgacatgtagtatatatttttatcttatgaatgccatgaaagaagtgcatagggaggatatacttagagctgtgacctctccagatcagtttaagctgagcattgaaaggtaagaagtcaggcatgtcaagaacagggagaaatgtcccaggcagcgggaacagcaagtagcaagtggaagtgagggccttggggtagggaagagactggtcatggcaagaaggttagatttaattgaaaatgtaacagagtaatcggagggttttaagcaaggaagtaaaatccagtgcatgctttaaaacaatttttcatttgctatactaagaatcagtttactcatcctctgtgaagaactgtctagtttctacagaatagaagaatttctgaataaatttcttagctacatacagacgcttctcaacttatgatggccttatgtcctgataaatcctacacatcaactgaaaatattgttaagttgaaaatgcatttaacatatttatcccaccaaacctcatagcttagcttagcctaccttaaatgtgctcagaatgtgtgcattagcctacagttgggcagatcatgtagttcactgcaaaccgtagagtactggttatcctcatgatcatgtggctgactgggagctgtggctcactgctgctgcccagcatggagtatcatactgggaaaagatcaacactcagagtatggtttctgttgaatgtatatcacttttgcaccatttttaagtcaaaaaatcctaaggtgaaccattgtaagtgaaggaccatccgtatatttgtgttacacttacaaatacagtgagagagcagaagagccatttaaatagttgtcagtgacaactacaacttacttgaatggcttttcattcagtaagatactaataacaacttttaaaaatttcttttccagctggtggaagttaaaggccccaatgatcgtctttcacataagcagatgatctggctggctgaactgcagaagctgggggctgaagtagaagtctgccatgtggttgcagttggagctaagagccaaagccttagctaaaaggtatggaattggggatatttggtcatacattaatgtaagattttcaagagtataaaacatgttttatttaattttgttatcgtgcattataaacctgatagtttgacttgtcattttacagtgtctgcatatcacaaaacagtgtttgcttgaatacactcattgattccacacagtgggtaataaacttttttttttttttttttttttgagacagagtctcgctctgtcacccaggctggagtgcagtggtgtgatctcggctcactgcaacctccgcctgctaggttcaagtgattctcctgcctcagggtccccagtagctgggactacaggtgtgcgccaccacgcctggctaaattttgtatttttagtagagacggggtttcaccatgttggttggccaggttggtctggaacttctgacctcaactgacctactcaccttggcctcccaaagtgctggggattacaggcattgagccactgtacccagctcataatgaacttttttaaaagagaaaaattttgttgaccattattggagctggatgcatctatatgattagatgtgcaaaaagctggaaaactcaaaaacaagtgatgattcatctttaggttttttttataaaaaagtagtggctgggcacagtggctcatgcctgtaatcccagcactttgggaggctgagcgaggcaggcgcatcatgaggtcaagagatcgagaccatcctggccaacatggtgaaacccatctctactaaaaatacaaaaaattgggtgggcttggtggcacacgcctgtggtcccagctactcaggaggctgaggcaggaggatggcgtgaacccgggaggtggagcttgcagtgagccgagattgcaccactgcactccagcctgggagacagagcgagactctgtctcaaaaaaaaaaaaatttaaaaactagcataaccagtgtttccttcaagtaattaattatatgggaaaccgagattcttgaattaagtttttctttactgccctatacacatttagctgttaaacttttatgattatctaagaagggctgaaacagttgaaattccaatttctttaggaatcaaaacattctcatgaagttgtgttgatttataacatgtaaatgcttgttctactgattgggcccggatcatgaaaggaatgaagtctttatcagaggcagttgtccttcattgtccatctccctgggaccatccctaataactagataggggtattttctctgttgacagtacagtcaaatcggctgctcatcaccattgtgggagggtctcaggctgggcaagggggtgtggtagaaaggtgatttatccatgcgccaggcccgggagtcagggactggaaccccagtctgtctcttgacttctttgaagccttcttgggggaatattactccccagtttttatatttatttattgaatggaaggaccagttagggcatgatctatcaatatccacatggctttaactttagccacttccgaattgctgttaaaaaaagttactgatcactacctggctttagagggcaagcagaaacatcccatggatgacacagaagtatgggtaggagaagatgccttcacctcttctatcaatcactgtgttccagtagatgatttcatactgacaacaacaaacagtcgctgtggaattttattaagccatcaaaatttccttcacattcaatactgttgaacaacaagataacacatcttcttgctcatcccacttgaactcaagtcatcaattttaggcacaaaggttttagttttctcgggaaatcaagttttaaccacttgaggttactactgcagcaagcagattttgttgacaaatgtgaacagctttcaccctctgttagtacaaattaatatcctttccttaaataaagttagttagctatttttggtttcaaaatcagtttccatcataaaataacagcaagacactgtacacctttacgttcaatactagaaatttcacccagtgcatcagcatctgtgcggcattccctcagcacgggctctgctggcgggcagcaggggtgctgagctctctctagtgcgccctgtgcagccacaccactgctgtcaccacatgtccctctgacggcagaggtggtataagcagcttcaccctggcccgactgaaggctgtcatagttgtttttcatattatgcacaataaactgtagcacaataatcatgatataacaactgtccagcaaaaataaaagtattttacatttgattatcatacaaaaatatgcatttttctatttttaaccattattaatagtacctaatatttttaaacttgtaaattaacaacaataaaatactacaagagttaaaataaacgtgaaggaagaaaattacagagggaaaaatgctcaatccaaaacatttagtaataataaaaaagcagctaaatgaaaaagggagaattgtgattacactgtcaatggcaggatacgctgtggtgttataaggagattgggtctggtttctaatcaaggactgtaaaatgtttaataattctatttgtataaactgaaactagcccttattttctaggcaacaagttggcaaaaaccttgggtttacccataaagtgaatttcttaagatattttttaagaactcctgtcctgttatatccagagacattatcaaattttaaaaggcaaataattcaaaaagaaacagctattcagtacatataaaggtaaaatacagttatcttgaaaacacttgttttagaaaaggaaataagctaactagacactttactataaaaattttccatatcttaggatggcagtttaagaaacagtcaaatttgaaagtatccatgttttaagcggggaatgaggagtgtgggggaggtggtgccccgtttcactgctgtaagaagcttcagctttgaccgctacagtggtaggtaggctcttgtcacacagtttggaaatactttactttagagagattcagatcaagcaaacaactgtgtctgctcattctcctcaactttgctgtccaaagttgggggctgggggagcacttctgtcgctattcaaatggcagtgttttgagagaatccatttttttatttctcctctattcctaagcattaggaactatgagagaaggacatctgtgcaggtgcccaactcgtaacctcattagttatttccagggggaagtgccagcaatagtttaccacactggaaatactgatggccaagcccagcacgcctcccagcaagccttgtttgtttttgagggcgagttttggcatagatggcactctcctgtctacagcatacacctctgtggaatcagcaccccagaggccactccccagtggctttcagaggaacaagactctggggactcctggctatgaagcttagtatgaaaagcctatttcaaatatgcaatgggattttcccaccccaattttaaaaagtgaaattatattttcttctgtaatatttgtatcctaaagtcaaaggcacttctaagtttaattatctgcagcaaatgctttaaaattaacagtgcatatcattttaaagttgaccctatgaagttaaaagcaaactcatgatttcaaaacacagtgatctaaggttccaaagaaggtgatctaaaatcataaattctggccccagaacactgaaccttcatcaggtgagttcaattagagacgacagaaagtaaccagaaaaatacatgaatacttcctaaaacctgctggaggttttatcagatgctcctaaaaatgacacgaaacacaaatttcctaactttcctgttgtctgctgcctggggctgctaatgtgactgactatcagatagccttcaggaggtggtaggaaaaatggatggagacaaaaatgtagcagacaacatgaacagtttgatcacggttacaagagccagacctgtaatgacagaaagaggacaggaacaaaatttacatctctcttaaaataagtgtgaaagaagcatgattcaacatgtttttaaatattagtgcaaattccaactattattcttacatataaagttattagagattcaaacgcctaggttagcaatgttaattcagaggaaaaaagttgacagcttccctcaaaatgttcagaaaacaccctattttagtcttcatttgctaatgtctcagtagacaaccatattttggccccacttaaaaatttgcttaatggtgttcctaaaatgcttcgtctgcacagattccctacaggagaaaatggaaatgaggaggagagaaactccggtgtccccgaggtgtcggtgtggtgagggccgctggcgttgaagtacatcctgctctggcccagctccccatagcaggcctccagggggccactgcgctgttgccgcagcatcctgctcagtacgtcgacttcatcagccaggagggagagcttgtgaaaggctgtgatggagccacccaggctgatctgggcctcgggaacccagcggaagtagcacagtttccacagttttatgtgtgttccagagacacgtggcagaataacaccgtgcaggttggcgggtttggaaaaccattctctaaaatactgctccgtatcactgttctggctgtcggtttgctgagctggatctggctttggttttaatatcaatgaatttctccttggaagtaattcttggtcactgatgattccattctttaaggcagacggcattcctcttagtgtggagctgtagcttttctatacagaagagattttattatgttccggggattccctttttagaaagattgaaggatgcaatggcaaatataaactcaatactatgaaaaattaatggaatttcagcctcaaagaacattttcctcccttcctttgtgtccttattctaatcctcctcccctggaattacacttttttatgtgttgactctacctaggctgttactatcagcctgaatgggggcgggatgagagtacctcctatccactaatttgcttaaggataagttctaagacgggctagaaaaaacactagacctggccgattctatcaagaacaatggcaaactgaacagaggcagtcaggaggccaaatgtctgattctttgttctgtacctttcagtagtctgcaaattttctaccaaaaaaaatcccaagaatttatttgggaattattaaaaaggcaaacaatgaatgttattaggacaagaatatagcagtcaggaggccatgactacatcacagccaggcggcattccctgccacagtggcggcttgaatcatcaagaaatggataaatggggctttagtaaatcaggcttgcaggctcaaagctgcaatctgcccactctcaggtactgagactttgtgggcctcagacaccaggaagaaagctgggatacagtcatttgagttaaaaagggaatgacccctcagaaacccgcattagcagtgttactcttggaagtgcctttacttttaacgctctctgttctgaaaaagaggtgtttggttacgtgtgagccaacatcacgttttgttagctgtgatttacctttgtccgtttaaaagacttcacggagccattctgtatacaaggtgtgctctttccaatgtagaaggggttatggaaaagggtgcgatcctttgctgtaaactggagagaccagtcccaaacagaggggaattttaagcccttctcatcacccaattggatgtttttgcttatagcaaattcctgcaaaataaataaataaatatttgcaaaact

SEQ ID NO: 48 - DNA, 52664 bp, Homo sapiens
agaaagggcctgggcggccgcactgagagctttacgcccggaggcgtcggcgctgccactggcccgcgacgggaacggggcgaaaaggcggcggcaccatgttctccctcaagccgcccaaacccaccttcaggtcctacctcctgccaccgccccaggtaaacaacccctccccgcgagcgcccgactctcctctgcgcttccgtggagcctccaggccgacccccgggaactggaggaccccaggaggctgcgcgcgtctccctgcccacagcagcgcggctgcctgattcccggcgccgcgaaatgcgccttctcgggagcccccactggctcggcgaaaacttgtaaaactcttctgcagccattctctgcccgaagttctgtcgtccgtagttttgcggagtgttgaggcccaggggagccttgggagctggggttttctttagtttccaacccatcgaccctccctcgtatgaccgccagcatgattgcagcgcttggggtcactggtcgaggcggttacccgtctgtcataaatgtgaacacctggaagcgacactggcagtttaaacattttttattattaggcttccaagtcgataatgagcagatcttaaaaacagctcagttaatatgcgaaagaatttaaatggggggctgtgtgtctttcgcatgtgtcatcacttagaaaacaacatttgctgtagcattttacggagggtggggggattgagattttgatttattttgctaatgtatttcagactgacgataagatcaattcggaaccgaagattaaaaaactggagccagtccttttgccaggtaaacattagttaggattctaacagatactttagcaacgtattttggtttaagattattctgccgactagtatcatgtggttaacttcccttctctcattaaactttctccagttaaaagtctagtgactgagaggagaaaaaggaactgtcaagaatgtcattacctcatttccttttttgtctcccgaatttctttttgaaaagatgtatatgtttaattgcttgggtagtaaaagtactctttgctgacgtgtttgccacttattgcattaatgattaatcattttaatgcattttgatagtataaaaagacgcctttattatgtgtgtgtctctataccaataacagagcttagtgaactttgaattacttgcttggcaattgttttttgaagttgtcagctgtatttgcaaatttgcttgtttcagtttagaaccaggcttttcccagcagagacacttaattgacatttggggccagataattcatagttggacgggcaggctgtcctgtgtatagcaacaaagatggcctccacccactagatgccagtagtagtacccttatcccccaccacctagttgcgacctagttgccacaccaaaatgccaccagtcattgccaatttttttttgtcccctacctctgggggacaaaaatctcacagttgagaatcactgctttagaacaaaatttgctataggtgaccttagagatggaagtagggattggtggtagaaaggggtttgttttagagcatacagaatattggtatggtattttgaattgtataacaattgtataataattaggaaaagtcagttgtttaatgcgattattaggggaagtagccagatacttaggaaagcctgttttaaacctgaaatcggccgggcacggtggctcatgcctgtaatcccagcactttgggaggccgaggcgggtggatcacgtggtcaagagaccgagaccatcctggctaacacggtgaaaccccatctctactaaaaatacaaaaaaaaattagccaggcatggtggcgggcgcctgtagtcccagctactcgggaggctgaggcaggagaatggcatgaactcgggaggcggagcttgcagtgagccgagatcctgccactgcagtccagcctgggcggcagagtgagacaccgtctcaaaaaaaaaaaaaacctgaaatcaaatactagtttgtgtggctactatcagcattgcaaaatctgactcattacttaaagccaaatcggtaaaataattagaattttgtaggtaaaaattgaacaaatgtggaaactttaaaattttaaatattatatagggacaaaatattaaaaacaccaaactttggttccatatgaaagtttaaaaagtgttttttaaactttactatgggagtcataaatattttcccttgattttgttagtgcttttcactcaacagtgtgtactaattaatcatttgtacttttcctcagagtgaacagtagaattactaagtaacccttgctccctgtgtgctctgttttagtcttagtcactctgagcatttaaaatgcagggacgaggaaacagtactcatcttgaatgagtgcctatgagctattgaactttgacttcgtttactctgaacaggcctggttcttaggctttgattcctccactctgcatactatgatttcacactcagaaacaacatggtcttagctgtaaatgtcagtgcttgctttttaattttttaaaattttttttaaatttttttttttttttttttgagacagagtctcactcttacttgggctggagtgcagtggcgtgatctcggctcactgcaacctctgcctcccaggttcaagcgattctcctgcctctgtctcccaagtagctgggattacaggagcccaccaccacacctggctaatttttcgtatttttagtagaaatggggtttctccatgttggccaggctggtcttgaactcctgccctcaggtgatccgcccgccttggcctcccaaagtgctgggattacaggcgtgagccactgcgcctggccacttttttaaaattagcttttaaatttaagatatgtgctaagaaaaggtgttactaagtatgcataaacttgaagaactttctcactgagggttatcaattctataaaatggctaaaagtcagagttttctggggaagttgtaaaccaagtttctgactgtgcttttcttgtcccagaaatggcagctaaattccgtattatttttagagaaattctaaaagagctgtaacactaagtctgaaccttttagttgcccattaaggaattctctgacctgtgttaatttttattgcattggcggccaaatcatagctgaaatctgtacatgcatacatgacggctctatcacccagcattctgtttgtacctgacttatccttacccaacatttagccggtcctgaattaggatgtcttttgcccccttcctctccccttctgttcttaccctctcattctggccttcctgcacccatcctggctgtgttctgtctggctgccctgttgtggtctctgtttcctgctttacctcgcctgtcacatctctcactgctaccatttgctctttgttggcctgtagcctactgctctacccatgaaatctggaagacaagtggaaagttaccgaactattggtgatctaaagacctagactaggctagagcttttactaagagggagtgaataatatagttcttgcctttgtgactatcagaatcaatagaaaacctggccacatcacctgtggctatatacagggatgcagaagttattgttcaacatggacaccgggaggggaacatcacacaccggggcctgtcgggggtgttgggggtgggggatgagggaagggagagcattaggacaaatacctaatgcgtgcggggcttgaaattcccggcgtcatccctagatgacggggttgatgggtgcagcaaaccagcatggcacgtatatacctatgtaacaaacctgcacattctgcacatgtatcccagaacttaaaaaaaaaaataaaaaaaaaaagaattaattgttagagatatggtattgcatgctttgctttggcataatgccttgggtccaagggtatcctacttcagttgcccaaagtttgaacttctaattcaataagcagatgaaaattagaacacaaaatgagttgtttatttgtgtgctgtcaccatgtgcactgttggaacttaagcctaatttcaaaatgatcctcatcttttattaagtaaagaaaacagaagaaaatgactagtaatttaatttagattgtggtttatgttagtaattttcagctttcctgatacatgaaactctgagatgggtattgtgcctacttcaactttgtggtcttgatgtctcacaaagtgccaggaatgtggtagacactgagatgtttactgagggactgaacgaaaggacctctcagaccacctggcttaaactgttaccttacccaggcacacacacagactaactttcagatttaggagtaaagggaagactgtgttattttatgccagacatttcaagagatttatgtcggagcctggaattgaaatagagtactctgtcaaagtagtcagcttttgtgtaggctttctctttatcttcctctcattatgtgaatttcattctttcagtgattatattgtatatgtgtaaaatcactccaatacttgaaaactgagtttgacttttaaagtgtgtgtgtgtatatatgtttgtgttccagtatatatttgttaagagcatgtaatgccagactctgtcctgtttagctgctggactggtggatcggttcggtgaggatgtgagtatctcctgggtgccaggtctgtcctggatagcgagaatgctggaggtgtcatgtgcctgtatcgcagaaaggcgtggggtgagccctaagctgcctgttgacaaggtagaagactgtgacctggatcactggtacccagattccagccagggcctggtatcagatttggatgaagtttttaccagcccttggtcaaagtgagaaaattaagaaaagtgcagttttctttaataaagataaatttatttgatttaaaagattgtcttttattctgagattatgttcttctaacttacttggaatagatactttttttgttaaatgttggtgataatagctgtagctttaaaaaagtttttaagttaacaaaattaaaaagttaaaaactctttattggtcctttaaattagttttgcactatacctggtttggaatctaaactagaacctactagatgagattattataatactatagatacaattttgtgagcactcacacagagaacattaattattttgtctgcctaggagtactgccatttttttgtttgtgttttgagacagggtctcgctctgtcacccagtttggactgtagtggtgtgatcacggcttactgcagcttcaacctcctgggctcgagtgatcctcacagctcagcctcccaagtagctaggactacagacgtgcgccaccacacctggctaatttttgtattttttgtggagatggggtccaactatattgcccaggctggtttcgaactcctgggctcaagcaattggctcaccttggcctcccaaagtgttgggattatagccgtgagccaccacacccagcccccttccaccatcctctgaaaaatgcatcctccctcttttgacaaattatcctttcctgactaactccacccaaccttgggttccagtgtggccagcaaggttaataacccaccctggactgcaagcatgaacacaggtctgcctctggatgttgttaggttggtactaagggaagaggtcctctttggtaatgctgcaagtggccacagttccagaagaatctgttgaaaagagtgaagaaccccaaggaagtgcactaatgtgtgttgaagtccctgggtttcattgtccttgcaggccaggtgacacaaaagccttgtattcttctttttgctaagctattaccaggcatgtttctgaacatactttgaacgaggatccttaactaatatagcttgcagattaatcatcataacagtcttgtcagctaggataccagtttatctccatttgacagatgtgaaaactatagtttgctgaggttaagtaacttgcccagtgtcacacagctagcaaggcagagccagagttctctgtccagctcccaggctgtgccactaactgctaagtagcacggcccacctggctgcactggtgacactagggtacagatttatgctttggaactgttggggagtagattggatgtcagcctagagggagttctctagtgaagtaaaaagagctctgtccttgtctttgcccttttcacaacagtgacagattttgacccagcgtgcagaagaactttcagagaatttcagctgccagaaaatggaatgtcttagggaggtagtggacttcctgttgctggctgtgccgaagcacagtctggtgaaatgccagcagctttgtattgaggatgtaagatttgcagtgagtggggcttgatggcctttgctctcttctcaccccagggcatgctcttttttaagggagaagagttgaaatgccaagactaacgataatgaatttgttctgcaggtattgagtgtgtgcttgatgcagtttggcagaagggtaaaatgctgaggagatgggatcctgttcttagacagtttcagttcactggagagatgcttcagtagaggagagaaaaagtagtaagagctcagaggaaggtcacctaagccagatttggagtagggcaggggtgtcaagaaagatctctggaaacaaatgcttgtgctctgaatcttgagtgcccgttgagcctgggcccctgtgctgaggctgtgcgtcagctcagttctttccctgttcgcatctacagtgctcacagcactttcattcttgagattaactattagataatgaatgcagtgattgtcagagtcttttgtaatcggatcagaaaagcatacaaccatgggccatctgggaaatgaaaatagccattgttgtatagatgtcttgtttattttttacaagctcactggcccgtactgttcttgttttctgtctcaccatacgtcttatttcctcagttgggttgttaattccttaaaggcaaagactttatctttcaagtgttttatgtaattcctttttgtaggtaggcttcataaatgattgtagactgatttttgtagtattttaatttgtgaatgcattgtttttgaaagaccaaaggacttgtaacacaccctcagaacagtgaacagtgtaactgtactatcttagcattagctttataccttacccgtagagccttaggaatgtttggagctgtccattccttaggcttttgctgcagtaccttaggccagcattttcttacccctccaaactcctcactatcgttgtcaacaccgttcatgaacctccataaataaaatcctacttaagcaggataaaatccaaattctttaaccttgtaatttgctaacactgtacctcactgacttcatttctcagtatttcccaatattgatatttgcttcaatcatgccgcttccttggtctcttccagatgccttattccttatttaggaccttgttactgttattatcacacattctctactatctcaatgctcttcttccttcaagatttcattctacaatttttcctgagatcggcactatacccttcctcctgccccatcctatcctgagtgctactcactggacttggtacttgcttttttacattgtgtgttagtaccagcattaaagatttgtgtttatcttccacatagtttcaatttcctgtgataacttttgagccactttaattcctgaatttacctaaagctagggtgaccagcttgtcccagtttgcttgagactgtcctggttttagtgctaaaaataccacatcccagggaaacccctctgtcccagacaaactggggcagtcaccctactgttaaaagcccaagttaagttatgcttttggcctctacacatcccacaggttaattagccacgtgtgccgtgagactttgccttaaactgtgttccaacctaaaatgtatgggaaacattatttctgtccatcaaacgtgatgaatttctaaatgtataaggtgttaggaaagataatacaacatggttttgaggtcctcagggagttaaaaactttcctagccatatcatttggaggtttattaactgtaattgcatttcccttcttatttatatttacagatgaaagggtcttgagaaaataaacttggatttcttgatttcctcccaggtgttagtagaaacctttggctcatcatcctctaatttagaaggtttttgcttaccgcacactgaagctaatttcctgctttttctggcttcatgaggcttccttgtggcatcctgggaagtgcttggtgctgtaaatggtcccaccgtggctgatggcatagcacagagctgggagagaggagtctggtgggttctcacaagcaggccagccagccgtctctagcacaccacccttttactgcataaaaagcacaggcgtatagtctccctgaaaacttcagaacctctagagctttgaagcttttattcggagttttctcttcaaggtcacttaatttaacatgtgaacaagagcagtctcagtaccttctttttatatatcctatctgggaagaggccactttgtgtcttctttttcttccctgtgtataagctagttttctggcccacagtgtttcagtgcatggcaggagcttatgacagctcctcttcagcattccttttttttaaaattatgaacaaatgacttacgtgagcagacagctgtgctacatgatccaaatattttaaagactggttctgcatgaacaaaatttagcattatcaaataaaactcatgtcactaactcgacacttaattattgtaataggaagacccaattgtagcatatcctcagaagtgcccttcttttctttcttcttcccctgtatccctctgtacttctgttctttgctctcttccaagggctcatttccattctgtaagaaaaggctgtgtggcgcttaaaagaccctggcccagagagtccttctttcactttttttttcttttttcttttttttggctgttgttaatgttgtgtctcttgtttattttcttctttagtagttttattttggaatgaatttgaatttgtaagagttgtacaaaagaggatagagttaatgtgaactcttcagccagcttccgctaatgttaatagcttatgtaaccttggtgaatttagctcaactgagaaaccaacaatactattagctaaactgcaggttttattcgtatttccctagtttttccacaaatgttctttacctgtttcaggttcacatccaggatactacatagcatttagttgtcgtgtctccttattctcaatgtctcagtctgtgacagctttttcatctcatctttcaagaccttgacgtgtttttttctattgaatttgattttcttttttttctttttcttttctttttttttttgagatggagtcttgttctgtcacccaggctggagtgcagtggcgtgatctccgctcaccgcaacctccagctcccgagtttgagcgattctcctgcctcagcctgttgagtagctgggagtacaggtgcgcaccaccaggcccagctaattttttgtgtttttagtagagacggggttttaccatgttggccaggctggtttcgaactcctgacctcaagtgatctgcctgcctcagcctcccaaagtgctaagattacaggcatgagaatgagatttttattttgcctcaaataatacatattaaagctctttaaacatagaaatatactactacaaaaggaaaaattttataattactagatttctgttctaacaaaccaccccctagaaacatcatcaaattgacttaaaaatgtagacgtaatttcagacttagagaaaagttgcaaataacagaagaatctgtggataccctttccttagattccccaataaaaccttgacgctttggaagattattattcaggtagtgtcttgtagtatgcctcttggtttggatttgtccgatgttttcttttgattaagcagaggttatggattttgggaaagacccacagaggtggtatcctttgcccttgtgtcatgtgagcaggcacaagacatcaacatgattggttattggtgaggttaacctcgatcacttcaggttaaagtgatatctgtcaggtttctcctctagaaagtgactgtttttccttttctgtactgtttgttagaaacaaatcactaagtgcagcccacattcaagggattgggaattaagctccacttcctggagagaggagaatcacgaatttatgggcataccttaaaactaccacagtaattagtcaatacttttgggaagatagctttgtgcttatacaaataacctgtttctccttaaagtttggctctctgaatttagcattcatcaatgcatgttgcacacagcagtcattcagtctatgacattgagtccatgatagtttcttgatctttactgtaatgttctaatcatgattttgtttccttattcctcctacatttattaattggaattcttctgtgaggaagatttgtctcttctccgccatttatttatttattattcagtcatctgttgacaacagtatggattcacagatactttttaatttactttctaatccggcatttttgttatttcttttgttgctcagattgttccagctttggccattgagagttatttcatcttggctcttgtatcctttggaaatgccgtccccccgcttttcttcacccccacttccatattttctggtattctggcattaccagaggctacagactcatcttctgtttcccctgccccagccttggaatcagccatttctctaaagagccctagttctttttattggaaaatggtattttaaaagcaagagctgggtactgagtgtgtatgttgttgctggagcgtcactgcttttagcactttcagagggcagagctagaaaacatacacacatgtaccaacccaggtgtacacacatctgttactgcatgtctatttgtatgtttattaaggcaagcataagttcattctgctatctcaaactcttaatctagcccctcggggttcatttccaaattcttgcttttgctttttgttgatggagtatgggcagtacagcagttaaacctggtttccatatttactttctgctgagtgctgtagctcattggtgagaaagggatcttttgacttgacttgcatggacacattctagtaggaaggttgtctgtcctcatcactcctgtgagtggtcctctagagctctttgaaatggctacaacattgcagatcaaaaacacctgcttttcaggtgcttcacttctcacctttcagatgggacatgcccagttgtgtcttctaaaccttgtttcagataattttaagagttgtcgcttcagtaactatctctaacacagggatcagcaaaccttttctgtgaagtgcagtaaatattttaggctttgcggaccataaggtatttgtttcaagtactcagctctgtctttgtcctgtgaaagcagccatagatggcacatgaacaaatgagtatggctatgtcttactaaaatttcatttacaaaaacaaggttttgtatttggcccgtgggccatggtttaccatccgttggacccattaagtatattctcctcctcttctttgtctcattctcactgcgttcataggcttgatacgttaacattcgtgcatcagtaaaagaatctggcttctagagaagaagggctgtccatgggcgtttgactcctaaatacagtttgtttatggtactagtgtggccacaaggctctgccacacaagctctgtctcttccttcctgttattacttctgcttcccttctcaggaacctgaaatcatatggtagtttgtttgtttaagtgatttttttttttgagatggagtctagctctgttgcccagtctggagtgcactgcaacctccacctcctgggttcaagcagttctcctgcctcagcctcccaagtagctggggctacaggtgcgcaccaccacgcctggcgcaccaccacgcctggctaaattttttttttttttaatagagatgggtttcaccatgttggctcaggtggtctcaaactgacttcaggtgatccacccgcctcagccaaagtgttgggattatagatgtgagccaccacgcccagcctttaagtgaatttttatttgagtataacatgcataacaagtttgtgtggatcataagtcttagaagtggatgaatttttgtagcaaggtttgaagagtctgtttttagatgagtttgctaaggtggcacagtatgtgatgattccgtgtaaagaagtcattgttacagggctgtgtcctctatctgaactggcatggttagtttagttgtttaaattgagggcctgcttacaattcatatctaagatttactggagaggagaaagggttgagtattcagtggcccagaatctgatatgggaattggtgaggtttatgttcaaggagccaaagaagatttaaattttatgtatttgaattactcagtgcgtctatatatatatatatttggtcatcttaaattttttttctcgttagaattcagttaaggccaatatttgaactttaataagttttggtacttgctacactgcagtacatttaattgtatgtaattatagggaaagactatgggaattgaagtcagaacacttggttataagtgcgaagtccactacttctttttaagatcttaggaaagtgatttaacctctttgggtgcaaatcctttatctgtgtattaaggaaaccatctgccttcctcaccttacaggttgttgaaagaatcagacaggacagatgtcctatttatagctctttaatgcatatgtaggcaagcagtggcagttctgtgactcttctctaacttacatatcatttacccaaacagcccttatcttccagccagcttggctgcttagccatattgaattactagtttctcttatctagaacaacttctgcccaactcatggtggacagaaccaagtgtcatgaagtgattttattcattcttgcattcagcactcttttcacaggcacctaccctgtgccagacactgttctaggcactaacatttcagcagtgaataaagtcagtccatcttctaccctcatggagcatataatcctgagggtaatgcaggcattaatttaaaaatatataaatataattgtagctatcatgagtgctggaaatacaatgcttcgatatgtgaatgtaaactagataggaagatttttttaaagaggcattccctagacagtggttggactaaggtagaagaaaagaatattccatgaaatgggaagaagcatggtcccatgagggattaataggccaccactgtgggcagagcagtgagggtgaggaaggctggtagctggctgggtatgcagggctcccagccatgagagggaggcttgtcttcaaagtggaagttaactcaagctgttggcactgtgaatttgacatgagcagattttaggtaaatgttaaggggcagttactaaaactagccttgtacatttttaagaacttcgaataaaagttattgcagctcaaatttgttataacctatttgttaaagagaggattgttttgagactatagttccattcttcatgaattggtaggagtttggagtttgtcagcaaacattctatcgggctaaaggtttttataatgaaagaaataggcaaagtggatcagtacactcacttttctaccattgaccctggagacagatggcttaaaatgttctgcgtctagttgacttttagatcttgaaattaaggtttaatgatgaccaagctttaaataaattgtagaaaagtattctttcaaaagtacattataacttttatattggtttcttatatttatttcttttaatcttttcttttaactcaaactacgttttaaggttttgttgcctactaagttataatctgagtgcagaaggaaacttgatttggctttatggaatacattttacattcagtgaagctgagctctgtttctcattccttacaaaaggaatcaaaggcattggtttgagagatcaagtcatgtgttaataaaacacaaatattccatcaagtaatactctgaaggagcaggtgtagtttatttcttctccagaaagtcttccagcagataaataatgagaggtagtatggcataggaaaaaagtacactgaagtcagcctttctggttcaaccagctcagacccctgagctatttttgcctcagttttacgccttggagaacaatgccttgtcattactattcactttatgaccatacagtgcctggcacctggtgggcaattggtgaatgttttcactatcctcatccttgccctcatgaaacactccttctaggtcccacaaagaccgttggtattttatgacaaagtaccttacaaatatttttctttttttaaaggagaaattgtcgtaaatgaagtcaattttgtgagaaaatgcattgcaacagacacaagccagtacgatttgtggggaaagctgatatgcagtaacttcaaaatctcctttattacagatgacccaatgccattacaggtgtgttttattagtacactgtttcattctatcaggctttcaactctaagtggtacatattattatataaaacataggtatggaaaagttatagtagaagtattaggtaatgcaatgtttgggataaattatattaagatttaaagtaaagtttaagaagaatgttggaacttgctagaggagtattagtgagaggattgtaagtcaccttgctttatttatcctctgtgatcgttcattatatgtccttttcattaaggaagttattccctctgttgcagatcttttaacctgcttataaaaatgacataaagagaaaaggttgtttgctaaatgattttataaatgccacacattttagtgatttcataggtttttttgttgttgggtttttgatttttttgttttgagcctggatctcgctctgtcttgtctcccaggctggagtgcagtggcatgatgtcggctcactgcaacctctgtctgcttcctgggctcaagctatcctgccacctcagcctcctgagtagctgggactacaggtgcatgccaccactcccggctaactgttgtatttttttgtagagatggggttttgttatgatgcccggattggtcttgaacttctgagcccaagcaatctgcctgcctccccctcccaaagtgccagagtacaggccactgcacccagctaccttttttttttttttttaaactaattagtgttattttcctaaaaagttaaattctaatttctaggaagagtgaagaatagtatcgatttaaaaattttcagtagccctcttgctattttatgttcttactggaaagtaatagttccatgtaattttggtttttagaagttcaggcattcatttgattaacttaaaaaccctggacttttctgtcagccattttgtattttgttttataaagtattatacacacttacccctagatctttctttatagtaattgttctttaatgaaatattggtatatgaactgtaaacttttaaatttaaggatctaatagtttagtgtaagtatatttcatgtagtcactcactaatttaccataattattatactgtacaaatatttattgtactgtatatttgtgtgttcattacagtcttatgtaggtatatttagactaaatttaaggcacttaaagatacccactgtgtagggacagtagcttatttggatataggcttgtgtgtttctctttgtttttagcttcataatgatcattggccccagacttcactgtaaatgagaagcagatacctggaacagcttaaatccagtaccactattaggaaaaagtaaaccagtgccctactgacagcagattgatagtgttaactacgtccttagtttgaacatgcaaaaccttttctaatggtttttatttctagtagactttgtgctttaaaaagatagttattttgcactttaaaatcttcagtgtgaaaatcaaacatgattttacccacttaaaatctgatgacctaagagcccttttttctttaatatgttgtggccagcttatccagatctagacatgcaaatgcttgctggtaaggtgattgatgatattccctatcttaggtattataataagattgttgtgtacattttaacctaatttctatctgtcaacattggaatggccctagctacctagacaaaagctttttgtgctttttagagataactgtcacagtttatcatcacagtttaaggcttatactaccattgtgagattattgggaaaagaattaatatgaacataattttttattccagaaattccattacagaaaccttcttcttggtgaacacgatgtccctttaacatgtattgagcaaattgtcacaggtacgtagtattccgtacatactctaaaagtcaattccactctggaagtattatttgaaaagtcatacctctcaaaatacttggattggcgttttatttctgtaagtttacttttgccgtttttttgagtcccgggaacataaagagggatatgttaataaattattttaaaaggaagatataaaatgtataacttttcatagtttctaggttttttgtcctctttttaattaaaattaatcattaaatgtgtctagatggtggttttatgcaaataatcatttaaaatatcttccaaagcaaagttaaaaccaacccccaagttctaggaattacaagtatgaaacattctagacaagcagagctcaaatgttgggtgaccttccaattattttcactaagaatttgtattaaagggtgagtaacaaataactgttacgcattttattttctctatttttttttcttttttagtaaacgaccacaagaggaagcagaaagtcctaggccccaaccagaaactgaaatttaatccaacagagttaattatttattgtaaagatttcagaattgtcagatttcgctttgatgaatcaggtcccgaaagtgctaaaaaggtaatactgttaaggtttatcaagttctgggttctgtactgtgtttactgatttcaattccgtatggcagttttcatttctcaattgctcagatgttttttaggggaagttatcagacatcttcttaagtaaagtcaaagccaagaatattaatagaactattttcttggattggtttatggctgttttaaagtgttctatataactttttatcagcttctcaaatattaaagactcttacgtggaaattagcatttttttacataaagatcattacttgtcagtttcttggttaaaaggttgaaaagttggtgatatactgtaattaaggtttggttaggcttttaattcagtactgcagaactttaccaacaaactgtaagctagacttatgttacataagatttaggtaaatatataattacgggaaaggcctagtaattattagtggtttaaagaaatattatgaattgagtgacactcaacaggggcaacacaaagctagtaactttttaactgccttatttttccacggccttccagataatgacttattaccctacttgtaagagtcaagggcatgttttccatgttttgctttgccagaggagtgaagctggtagacctaatatggcccccgttccagtctgtgctgcagcaaatgcagagtcacagactttccagtaggaagcttgcgcgtgtgtatgggaatagggcaacagtatcttagtataataggacgtggctttctctcagaatggaggcagtctttgcaccaccaagcaatgagtgcctttgttttccatggttagtcaactgactgcagtaaatcttctgttgataccaaaacaaggctggcaaaaatactgtaaggcagctgtcttcatatactttggtgaagaggtggtagatttgtttttagattgagaaccaacagtttcttcacaggaaggcaagcaggagatgaatatatgaaaatacatctgaaaatatgtgactgtctagcagagtagagtggttgtaggctcctctatgggtaaaagttttcaaatggtctgtataaccatctctcagcaagctgcattattgaaaattcaactagataactcttaaagcctctttcacctgttcgattgtgctgtttgtgattttggcattttactaatttaaagtgcctattatatagaaggactttagaattcatgatgtattagactgtacataaaatatttcagacaggttaattcctcaagcttatttatatttgtaatttaattgatcaaagcatcaaagacctgcttatgaaaaccttaagatgtgtagcatctcaagattagggacatcacagaacttgctagattgagttaggacagcatattcctaaggaagaaattgatgcaattgaccggatctctttcggaaagttcaattctccctcttttactgtatttttcagtttacactattttaatgagtggaaataataattatttggcctagttcttgaaccatctgtagtacttgttggtcatttttcatgttgaggcagtgtgctaaattttgcaagtagaaagaagggtaagatgcagtttcttgccctagagaacttaaatctagtgaagaagataaagcatgaacaaatgaaaagtaatggtacaaagtggcagcataaaatcaactacacaaatagttgatttccagatgaacagagcataataagtgctgtggaaattcagaatatcccctatgtgttgtgctgctggttcatgaagagggccttactaaaccgtctgcacaaaacaagccagtccctcatatgccctttcctaagaccaagtttcagacaaaaatcttttccccagtatcctaaaatataaaaagcatgtgagtctctgtcttttgtatagccacgggggttgcagggcaggggagggtgcaggaaaaaaaaatagatgcaatgagaatataaatagtttttttgggatttacgcatttcaaacagggttaagttgtatatggctaccaaagcttgacggctttgtgagttaaaaacaaaaattatggcatattcttttatttcaagtgaaaagttttcatctaaaattcggtagcagttaggaaattatggctcatttttacctcctggaagcttggaatactgttttctctggaaaatgctttgctattttatcagttgctttaaaatgatgaaatgcatgtttggagttctctggtgggtaaaccgttgattcattttgaaatacctaagccatttatgtttttgttttgaaaaatgaaattcaagaatactaaattggttcacattttgttaaatgttctgaacccttctggttgtcttgttggtgttgtttcaattgtattatgacaaaattagattgctttgggcacttgtactcattaatattcatcctcattatcctcgagctgtcacaggaaaatagtgatatttgggaaaggtctgtataaagaaagaaggaatttgatggtgcagaattggacatctaacctcatagcaacttagaaccaccattttcttttgcagaacctttgctcaaaactgaagggcaaaataataaaggttgtttttaatgatttatctatatatctgtctgtgtagataaagataaatatatagatacacatgagtgacaagtgaaatacatgccttttgtctccactttgttctctgattagtgggttgtgaatcacttcttcaggaatactttatagaagtgaattccattcatctgattaaggaacaagttggccttttcatgaactgtcatttttgacttgaatctggtactgttttttggtggctttcaggccacagaaataaaccacttttgtttgcaaatgagatagaacttaatgaggtttgagtgtttcctggatttgagtttcttcagtactgcaccccaggtgatcttaggaaagaaaccatccactgtgggtacttctggcttctgtccagagaagattatcagctttggtccaaaaattgatttaaaagtagtttacttctttttctccaataaaatatttgccataatttaatgtctttaataccaacattttcttcatttcctgtggtagccaggacaaatgaagtatttcagatctttcaaaaactcttaggatgaaaggtaggaatttggacttaggtttttaaaatagtgtgtatgtaaaagtgcaaagaatggggccctggctttctcttctcggagtgttccacagtaacaacatgaagacaatccaggtacacaagtttgtatgtgccttagtctgtgtgtccaaagaggcctcttacttaggtcatatgaacataagttatacacttgaaattcactactgaaaaacaatgtatttagttcgagttctgccaccccaaaaaaatcaacgagtaattcaactgacttgcagttttacaatatttttatagacttctttcagcgtagatgcttttggacatactcatttgtttcctaacctgatgtgatattgtgctatttttaaggggcttttaaaaaatacgctgtgttgggttttgccttgaaaataggctttatttcttttttgcctcatggccacaaaaaaaggatgtccatgatcaatgatctgtgaatttcttttctgtaaacagaaagagcatgtaactgctttctaattgttttggagaatgtgatagacattagtattattattattggcttggagcattttccttaatatgttggtaactacttttgtcagtgaatattagtgtagccactgttggacacagagcaccgtcagaaagctactgaagtggtgctgcaaagtgcagacatcttcagatctttactcaagtctgtgcagagaggtctttcttggtctccttctctactttttagcctgtctccctcttctcactgtaacacttcatattccccttccctgctctattatttttctcttttagcattcatagttatctaactttctgtattttttctctttatcttgtttagtgtctgtcttcccactagaatgtaagcttcatgaggacagggattagtgtctgttttgttcactgcatctctagggcttacaacattgtaggtactcagtaaatatttgttaaatcaatgtgaaatgtgtcatttatccttaaggaattgaccttcatggtagaagtgtaacagaaccacctatatcctacttttcatccacatcataactattatgtgaataccttggaagtaaagcaaaataagcacttaactaaagagacgctttatattgaaactgttgttctgggtttctggaattagtactctgaaattggctccctctaggaaggcttgtgaagagagtagtgttgaacagacatgacagtttccaagaaagcatagttggctaagaggagtaggattttccaagcaaagagtgtgacagtggagatggctggggctaagtcaggcagaatgtgttcaaacctgtttttctctgacctgagattgcggagggaatattgggaaggtatagttacctggtgaggagagccagttttgtgaagaatcaagaatgaggagatttaatttgttatgcagatgtctgggaaccacagcagattatcaggagagcaaaattgttagtcagaattacatcgttagaaggtaatccttaagttttgtagatttctagaatgtaaggaagctctcagaggtgccataaggtgagtatggcctaaggatgtggctatggcagtgtagcaaaatggacaactatgaaaaatgtctagagaaaagtgcaacatagcttatcaacggtgcccaaacaaataggaaggatgagaactttttcaagctacagatttcagtagttttgctgctagaaatgctttaaggaaaactgttaaaaagattaggaatgggaatatagataaccggctcctaaattttgcaagtgggaccgtcatagaaagctctcctataggtattgagaaatcgagataccacgtaagtttcaagaagcagttttttttttctttttggtcaaaactaatgacaaattctgtccccttgtttgtatattttaacttagtgagacaggaaacatttattctatagaagacttttaaaatgtagtttaaacaagttgacacatgcttactggttaatgaaatgtgcatcaacccactccaaacaccactaatttgacatgaactaacaattaacttttcttactcactgtcaaaagtatatcattctgccttaacttaacgctttaccttctaaataaaatttaatcttttaaataagtttttctgctatgttttccttgcatatgtcttaaatttcttctttcgtctttgctcactgaagagcattttctcccacattctagtgactaccagggtttgtaagcctagagcaccatccttcattctatctagcagcagttgagaataataacagccatatttctatatatggagctcctccaaaggcctagcctgcattaagcttgttaattcttaccacagcctaggtattacttttgttttacaagtgagcaaactgaggctagaaaagaggaaatgacttcacacatgttatgtagcaagtacttgacagagctaggattcaagccccctgatctgtttgattctaaagcccgcacgttttccaccacagggcacacagtcccaaaccattttacttaaacacagtttgtgtgtgtgtgtgtgtgtgtgtgtgtgtgtgtgtgtgtgtgttgtttttttgatgtacctctttgagccacccatgcatttttggagtttcttgctaattttaattttttgtaattatgtttctctatttagatgtttaaatccatgaggcgtaaactttaaagtttcatgccttatattaatcctttatagtccaccaaaaatgaaacttttttcttccttttttggagtggacatgtagtcactgcctttttggagaatgcttctttagtttgaagctttctttattggactaaaattactttccaattaaaatttaactcagcaaatatttactgaatacttgccatgtgctagctaaagataaacaatgtcttgagggcatgaaagtgaatgagatacctggccttaaggagctcttttatattctaggtcaacagaaaaacatgtaaatagtatctataatcactgccccaagatgatgctcccagtgcccaaggccttattgtacatttcatttaactaagtgtgttaaaatcaaattctaaatgtagaatttttcctaggtatgccttgcaatagctcattattcccagccaacagacctccagctactctttgcatttgaatatgttgggaaaaaataccacaattcaggtaaatatgaaaatattaaatattgtgactaattttacatgtgtaaattttactcttatgtttaccggaagcctccaagtacatgagctttaatgattgtagaattactagcttcataccttagagaagtaagcactacatgctaaaagagccaatagtttgtcagattatttcttgacaagttaccaggaagaacctttaatgctatgaatatgggcttataagttatgtcagatatttaatctccagtcactggcttgtattttatgatgaagaatatataacccaccctttttaattgatagcttgagttaaagtaatcttatcttttaagaaaactggcagaaaactaaaagatatattaaaagcataatcttttctggcaaggtgtgatttcatgcaaaagctaaagtgattaaaaactttttgtggacttcattaagattctcagaatactgagtttctatttctgagtaatactgatgaaaggaagatgagcatttttccaaggacaagtatattctagacagcttttgtgaaagtaaatagttttgtctatatatctgacagtcatgacatgaccagggaagattccagatgatcatgcaattctgtacattctgtttcgtacaaatgtaattttaataaacaatttttaaaaatatcttgatagagaaaaacaaagagccgtgtctcctgttagccccattgtcagttagtgactgcaagtcagttaactgagcgaagcctgtgttcttttatttaagcaagaaaaataaatcagctgtgtatttataatgaaaaatccattcacccagcatgctctgggccatacaaattattaattgtactgaaattttatattttgttaccacgaaacatggtagtaatttaaataactggcataataaaagtatattccagcaacactatattgtaaatacattaaaatgtatcagtgtacggtatctgaagatgcatgtgtataagtaaattttccttagtttaaaagataactacctttctgttaagcactgagaggaccaaaaaaaaaaaaaaaagaaaatacagtagagataatatatgaaaataatgctttgcagagcagcttttatcatacagtattatatttatagaaattgtataacaaaagtatttgtaacttaatttttcttatcgatatatacataattgtaactgaggcttaagcaatacagttattttttgaagtttattaatattaagtaaattcacttactgtctaaaaataaagtatacagatcctgcactattaggtaaacactccttgggatcatcgtcaagctacagaacagtgatcaaggttatcttcaataagatcctcacccagagttgcaagggttgtaggagtgagtctttgattcctgctcaactgtttatgatacagaccagttcttcatgctgctgtttttccaatagaaatgattcatttcagtttacagatccataacttctacagtaatgtagtgacttgggctcagcaaagacagtaaacttcattatacagttggtaacctgatgcctgcttcagttactttccacatttttcttcattcataccttgtgggcatctctggtttacagtactttagtttatccacccataggtcttctactactggaattttaaaatctacatcattcagttccactatttcttcttatatagcttattgataaaatttgatgattaatactgaaaatattcagggatgcttttttatattacatccttcagactcctcctttgacaagtacctcataaacataacactggccatagttttgttaagattcctcgtagggtaacatcctttaatatccttccatgctgttacagaagcataaatactgcatctttaagatcaaaaggagcctgaaatttccacacactgcagtcagaattcattaatttgtgagtgaaagatgcccactcatccactcttgaacttctggatgacaccttgattcattggctggattaaagaagtcctttttgcaggcaggtaggtgacaaagctgtttccacaaataagatccaaagttggaggagctcccctgcagttatctgagaaaatgatattttagctggccttagtcactcaggttttcattcatattcagtatcacatgaggaaaagccatctctgaaaggtcctgcagtcatcccaacacttctgtgaatatcctggagtaaagtaagatgtgtagcacccaggctttggaacatcgctttgcacaaacaccccaggagatattactagcacaaacaagaacaatgattctgttttttctcttttaactttaaagaaaccatgaggactctgttttcatcagtcagattattattgggcaaataacgtcaaaaaagtacagattcatctttcttatagaattgataagatgtcagattatgcttctggaccaaaaatattgaaagtttcatgaagttatctgcagcctagtgtcagcaactgcttcatgacagacatcctgcttacagatgctgtgatgtaatctgaagttgtaatgaaatttcacatcagaagttgtacattttcagtgacatttaattttatcctttttattaacatagatcttgttattagattttccttaaaatgcctatttgaaaaacacaaggtacacaatccatttgaaacagtataggaatttttaaactttgttgcttaagattctcagaatagctataaatgattgttgaatattggtggttccagccagctgtatacatcaggattactggaggaacctttagaaatgcagccatgttggctccagcacaggtcagaatctcccagttaagaaccactttgttgactcatgcttttgaactgattaatactcacagtcctctttttaccttattcctttgtgacttctaatttctgcagtatcatcagagtggtgggctttcttttcatatattgatgacttgtattttctgttgcttgaagccattctagatatcaattggccaattcagtggaaattatctaaaataaccccaacagtataggattagacttttgtactgtcacagaagatagccaaggtcaggagcatataatatctatttcacgcttagtctgctgtggaggcatgtcataaaacctcagtcaggtagcggtcagcggagccaggtctccctgagatgacccacctttcactgtgttggtccagcccctcatagcgatccactcatagagcaggccactggtatcaggtcttttgaactttggaaagcattcaaatttctggactataaaaccagattgagtatacattacacattctgtaatgagctctaactgaagatgatatagaacatataaaagacctagtcccagttgtttagaaaagtacaggatttgaacgagagaaatggcaaaaataacaaacgatagaggatctcactttatgcttagaaaatatagatgttctcattttacgtttagaaaaatttgtgtaagttagatcttgaaacaaaatttggccagagaaacaatctcataaacaatagcacattcttagcctagcttattaaagtctgcaacccaaaacactaaaaagtattcagtgctgctggactcagtcaccaaactgttttacataactgttaaaattttgagtgtgttttttataattcttttttggtggtggtggttttattgtttggctaggactgctggttcagtgttgaatagcagtaatattagcaggcataatttcacttcccgcttttaatgaagatgctcttagctatgtctttttgataaacaccctctatccagttaaggaaattcccttttattccaaacttgctaacgttgttgggtttttttttttaagtcataaacaggtatctatcatatgtttttctgcacttacagagctagtcattcatatagcctttttcgtgtttaatgtagtcatatgatgaattacttagattttctaatattgaatagctttctttgttttggtgcactggaacactgtatagattgggctttgccaaaaattccatatgcaggttttgtgttctggagagatcataactcctaagtcttccttctcacagacacgctttttagttgtgttactccagagaaggccctgagatggagtgggactctaggatgtgggcttagaatgagcattttactatctatctatctatctatctgtctgtctatctatctatctgtctatttatttttgagacagagtctcgctgtgtcgctcaggctggagtgcactggtacgatctcggctcactgcaagctctgcctgccaggttcacaccatctcctgcctcaccctcccaagtagctgggactacaggcacgtgccgccacacccggcttatttttttttttttagtatttttaatagagacagggtttcaccgtgttagccaagatggtctcgatctcctgaccttgtgatccgcccacctcggcctcccaaagtgttgggattacaggcatgagccaccgcgcccagcaacattttactttttaatgagctttgttaaaatcagaatcactggataattctgataccacttaagaggagtccaaattcctaacatagcccctccgtaatctagagcagcaccgtccagtgatggaagtagggcagccactagagccactagccacatgtggctgttaagtacttgaaatgtggctagtgcaactgatggactgaatttttaattttatttaattttcatttcagtttaaatttaaatgggcttgtgtggctagaagttacgtttttgggaaacatactagagtctaggccctatttgatttcccgcctctcttccaccacctgttgaatccctatgctctagctgtatttagttacttgatattatacagttataccatctttttaaagttcttctctgtctagcatgcctacctcctcctcaccagctacctggcaacttttgacttgttccttagaactctctttagttgtggtcaagtcatgaagcttttcctgccccggcctctctctgcagcgagagttaggggacttctcttttgcatcttcattgcactcagacatctggtactctgtgattatcacacttattaatgctctcaagatagagataaaatcttattcatctttttgctctcaggcattagcacatggggagttctcagaaaatacctgtcttataccaggaattaatgaataatcagtaggaatgagcatgacatgttcatgggacgttggagggtagtgcatggctgcagaggagaatgggaaatgaaggtcagataagttacgtgagggatctctaaggccaagagaagccatttaggtttgatttggttggaaaatgagcttattgaaagtttaaggcaagggactagcatcatgaacacatctttttagggaagtgtgtcttgtggtaagctgctggctggtttaaatgcagcagaatattccattggggatgccagctgggagacttgccacagttgcagcctgcagcagaaagaccctgggccagaatgggttgtgccatctgtcaccagatattgccaaggtagatctggctgactttgtgggacagcttgtttctcaataatcactttgcaggcactcttgaggctgtgagcatgctcccagaagatagcattacttctctctcagagcaggctcctttctaaggaaatgcaagtctaggcctgccctgctgtaatcttcatgtggaaacagcactctagcaaagaacaaggaacctgatgagcttttcaaaggaaaatcgagtagatacaggaaaccaagaattttctaatgagcagatagaaaagagcaggtaggtgagaagttggtattagaaaaattaaagatttgaagggcttgaggacagagatgattgttggatgtttcatttttccaggcaaaatatgtggagcaaataatcaaatgacatggacttaccccacaattagggacggagatgaggaagggttaggaatagtttctgttagaatggtagggatggaagacaattgaaaattaaagagaaaataaatggagaggaaatctaggcagcagccattcttcattctgggggaaggtggtcaggaaaaggaaggaagaaaaatgtatagcatagtagctagagtggtccggcgtgatcaaagtgttttcaatatcatgttgactgacctgtttacgtttgaaggcagagaagatagagccagtagaaggagagaaaaatcaaagctgttttacggagttgtgaaagagctggataaggacaagactaaatgagttatttttaggccaggcgtggtggctcatgcctgtaatcccagcactttgggaggccaaggcaggtggggcacctgaggtcaggagttcaagagcagcctagccaacatggtgaaaccctgtctctattaaaaatacaaaaattagctggacatggtgcatggtggcaggtgcctgtaatcccagctactcaagaggctgaggcaggagaatagcttgaacccggggggcggaggttgcagtcagccgagatcatgccagtgcattccagcctgggcgacagaacgagactccgtcaaaaaaaaaaaaaggagttatttttaaatggaaagggcaagacagttctcggagagacttggaaggtgaagcaggttagagacagcacatcagagtatgcatgtgacaggaggctcagagaagagggaatgctggggaaaatgtgactgttaaaattcataatgttgctttttcctacagcaaacaaaattaatggaattccctcaggagatggaggaggaggaggaggaggaggtaatggagctggtggtggcagcagccagaaaactccactctttgaaacttactcggattgggacagagaaatcaagaggacaggtgcttccgggtggagagtttgttctattaacgagggttacatgatatccacttggtaagtacaattttagcaatgttatatatggctggaagtcacttccctatgaataatcatcaaactctgttgtcattgatgactttcaagttgtggttaatggaatatttgtttttaataatgttttaataaatattttattttaaagatcaaggcttattaatataaattacggtatcccttaaaagaagttgatagtaattccttactgtcatcagtagtcagtgtttattgcattatatcttgtaactggtgttttacagttggtttgttcatatcaggatctaaagtcttcacattgaatttgcttaatatgtctcttaggccttttaatctacaacagtctcctcccacctcttttttacctactatttgttgacaaaccaggtcatttgttccctagaattttccacattgtagatattgcttgttttatccccagggtgtcccgtaatgtgttcctctgtctctaatatttcctttaaaatgttagcaacagaggcttaatcggattcaggttcagtacttttggcaagaatgtttcattaggtggttctgtgttctcctgtggagtcacatcccatctcaggctggctgggctgtgtctctctcattgtaatcctgacgaccagtgggcttagagggtgtcaacctgatccacccagtaaaagttcccctcttatatcatggtttgagctcccaaaaatagttttgcactgggagggaggatcattgctcagatcgttatttcactaaggattgctattgttcaccttctaattctatcatctttctgcttttatcgaacttttctctcaccagctctttagtgccctgtaacacagttcgtacaagaaaagcaatataaatatctacattttctcctttacttaacatttttccaaatagtgagctggttccctaggggatcttctagaagtgactaggaatttgtttttttaatttgtttaatgtcatttagttattatgaattttttggaatgccttattttaaggtcattgaagtcctcattagttcacgcacataagcagctttttagaaaaaggaagaaaagcactactgtgttattactggttaatccagtaccaggaacttctagtacagttctagaaaggtgctttgcagcatgtagcttgtatcttttgcttcccctggaatttaagcttcaaggccagcacactctggtatatgtgctgagaaacatgtgatggggctgcccagccacgtcggggaaagaaggaagatgtcttgaggtgcagtgagcttgcccactagtaattattgtctgatcagtgtcctagagtctgactgtgccttttaggcatggggaaaggtagaagagggacttaagaagagagctaaagctcctggtagatttgtggggttttcttttgtttgcctggtgtccttaaccatagcctgtcaagagaacaaaggtggatatatttttcagtgaacacatacatgtttaatagtcattctggaaaatatttctaataccttctttggaattttctcatgctataaatttagatttttaagaattggtcatatcgcaccaattttagactaagaggtgtaggatcgtcactgcccccccatggtgcccaccatgtggctactaagtggggtgcacattaaatgcggacaacttgcttaattatttatagggtctgcaggagcacactattcctgcttttagcacagcactcatataattttttttttcccctccagccttccagaatacattgtagtgccaagttctttagcagaccaagatctaaagatcttttcccattcttttgttgggagaaggatgccagtaagtgatttctgttggattttatgaatgctgacgtccattgtttctacacagtgaagtaaggattctacctctcccctagctctggtgctggagccactctaacggcagtgctcttgtgcgaatggccctcatcaaagacgtgctgcagcagaggaagattgaccagaggtaattgagaaatggtcattgtcactttagatagttttacttgttgtgtaactacagtgagttccctactaattgaaaataacaaaatgcatagtcttactaattagttagcaccatgttttatataagaattgccattttgaaaagaatgtgataatattaaaattaactgacattggagttacactaaatataatttaattatttggtttgtaagacacttgtggatcttacattgctgacatcttgctatagcatttcctataacatactttcaaagtgcagtgatatccagttgagacacttcaggataaatcaaacttttcttgtagtttgatgtgtcttatttaggtctacacatttgcaatagctagaacagtggttttaattagccaccacagacgagtctggcatcatctgctgtggtcattagtaacctccacgtcattaaagtaggaggcctttctcagttgtgctcatagcagtgagcaatactattgatcactctctccttaaacccgcctgggccctcagcctctgctcctctccactctcctgaagctcctcttcctcactggcactccgtgccttctgcagacccatcctcttctctccagacattacacagattctaaggccgcttcctcatgttctgtattcttttcctaaagaagtttccccaagaatgtggctttagtgaccaacacatttatatcttcagtctaccttgacttctacatggaggtctcaaagaccccttaaactcattatgtccaaaaccaaactcaaggatatggcctccatgccctcccccagcctgctctcagaaaccggggggtcatcctggatgccttcctctttctttcccttccccatcaccaatccctcctcaggttttctcacttcacttttcagacaccttgcaaacccatgtgcttccacaaacccagctccacctctgcctgtgtgttataagtgctatcatttcctccttccatgtctcctccacccctgggctccagccccctggactttccctggtgttttcaacctcctgacattgtccagcgctcttcccttctggactgccttctttgcactcatctgggaacactctccacgcttacccacttggcactccttgtttctttttttttgagacagagtctcactctgtcacccatgctggagtgcagtggtacgatctcggctcccgggttcaagtgattatcatgcctcagcctcctgagtagctgggattacaggcacccaccaccacatccagctgatttttgtatttttaatagagacaagatttcaccatgtcggccaggctggtctcgaactcctgacctcaggtgatccacccgcctcggcctaccgaagtgctgggattacaggcgtgagccactgcacccggctcactcattctttatatctcaattcaaacatcatttcctcaagataagccttctctcccctctaaagtttgatcagacctcaaaagtctatgttcttagagctcctgagtttttaacatttatttcagtttttaattatatatgtgtgtgttacagtttgattaccgcctgtcgtttttactccatgagatgagggactatgtctgttttgcacaccgttatatatttagcacccaggaagcatatatgatatttattcaatacttgttgaataaatgaggagtaaatgaacagatcttataaaacaggcttatggagcctcagaaattgtgtatcacagtcctttttggtacagccagagtgtagggtttttccactgtaccgtaactgacagagccatattcactgaagcaaataaccatcaagtgaccctcaaatgaccttcagttttctggaaaggaaggtgactatagttcacacgagtccgtattctctgtggattttgatttacctgaactccatttggaattaactgtctgctgtgtcatactccaagccttgttttcattagcatacatgctgatgaagtgcacagttaggaattttgctgttaaagggacaattgtagcattgttgggtgagagttagttataaaaccttataatcagtggcagtttcagtgatttattaagctgaaaattactttaatgccttttgtgttttcagctatcctattcttcataagtagaacagatcctcttttttgtccaacctcgtctcctaacctttttccctcaggtgtgtcatctagccccactggccttctttaggtttctcagcagccatgcttgttacctgccacagggcccttgcactagctgccctctgcctagaacattttcaccccagatctttacattgcttctctattcatttaggtttcggcttcagtaccatcttcacagagcagctgtttttcaccatgtgacctaaagtagcctgtaatctcatgattacatcatccatggcattcaccacagcccatttatcttatcatctaccccaccccacgaagaatgtcaaccccccacttgcttgggcaacaccagtagtaaaattggaatgatacagggaaggttagcatagcccttgcacaaagatgacatgcaggttcatgacacattacatattttaatgaaatgggagcatattcttgttatttaatttttaaaaatcagtttatcaagcaaatgtacagcgccattttatttttcatgcctacattaaattccatacacataaaggtgcatagaggaaacctagaaagattgcaccaaaattttagaattctgagtgattttgtttttcttatcttttctaggtgtttttaaacattccacactaatttatattactttttctattcaggaaaaaaaaaaacaacagcagggttttgttttgtttttttaaagtggtgtggaagttacccattgaatatagatgggaatcccagtcctggctgtttcctttgaaaagatctagagaccccatggcacatatttatagtagcccattctctcctaagaatagaggaagggtgggaggaattttggtgaatgtctgtacttgcagtttatcctacagcaaatcgttaagactgtgggaataggtgctttgcattctctagagctggagaatgtgcatctggtttgccatccttctgtctacatcatgtggaaagatgtgggagtgtagggtctccttaatctaaatgcagtgctgccccgccccccccttggcagtgtttctgtttcccaggcaagtgttccaatggatgtgctttattttctcccatcagaaataagggaatgagcccgggcgcggtggctcacgcctgtaatcccagcactttgggaggccaaggggggtgaatcacaaggtcaggagtttgagaccagcctggccaacatggtgaaaccccgcctctactaaaaatacagaaatttagccaggtgtggtggcgggtgcctgtaatcccaactactcgggagggtgaggcaggagaatcgcttgaacccgggagggggaggttgcagtgagccgagatggtgccactgcactccagcctgggcgacagtatgagactccgtctcaaaaagaaaaagaaggaaatgatctaatttgttctgtgcactgcacgtgggggtggcagtgaggtgaatggcagcattctgcagtagtcaaagccagatgggtgggagaagttgggtgctaagagggaaacaaagtttacctgtcttctccttgatttcactctcagttttatgagaatacagaaaaatcatgcagagaaacctgatggaatagtctctaaaactaaaaaataagataagcaatggttctgtcttaaaaaaaaaaaagtaaactccatgaaggcagagaccttacctgtctcattcctctctctatcccctggtctatagtaagggttaaataaatatatgctgaaatgaatgagtaatgactaaagtatttttgtctttattaggatttgtaatgcaataactaaaagtcacccacagagaagtgatgtttacaaatcagatttggataagaccttgcctaatattcaagaagtacaggcagcatttgtaaaactgaagcagctatgcgttaatggtaatttcattcttatttcatatatataatgaacacaggatacagagttgcatgagatgtcaggaaaagtgatgttcttaaaaatgtagaaatagatatatttaaggagtctatggaactatttgtacaaattatatattattgtatgagaacttcagaacctcctaaggaattaagtttaaactactttttgttttagagggggaaaaatgagtgtattaaatttccttcagatgatgaaaggtataggagaatacttttataaaagcatttgctgagtagaacactgtattaccttacagacaaacttattaagattgtaatacatacagttatactttgagataggtgacttgacatgggtatcaaacagctgtgttatatctgtagcatcagaattctgatatatctgagcaaacgtaccaggtggctttcatgtgtcctgcgggatgagtcacatgaaagcatctttggtgtaatgtgggtcctcctcaagagatcctctaagtcaccagggagtcagcaaaggcagccttgcagcagatcttgagcaatgagtaagcacttccctgggggagggccttgcaggggcggggcaggggcaagttgttgaaaaaactagtgtcctgaatgattatgtgcactctgggcagggcagtgaggatgcctgtcctcatgcagtggctagccctcggccacgtgagccatgcacagaggcaccactggcagcaggggtggggcagggaagcaggagggcaaggcttgcagtgagaaagccaagggctagggcctgggcagctgacctcacaggtcaggagggccaggatcaaggcataggctgagcagggacggctggaattcttagctgttgggagtcagagttggttggactccaagatttccctgaaagagcgagagagaagatgatggagccccaggggaatgctttgttttgctttgttacagaattgtaatgtcttcttaaatgcttattccatgttattaaagtgaaaatgcatgatatttacttaaagctaacttttaaatattagaaactgatgtatctctttactctgatagggatcgtataaaataaaaagtaaaaatgtgtatgtatataatttattacagagccttttgaagaaactgaagagaaatggttatcttcactggaaaatactcgatggttagaatatgtaaggtttgtacttctttactttcttttcctttaactttttattttgagataactacagactcactggaggtacaaaaatagcacagagggccatgtacttactcttcatccaacttcccccaatagtaacatctcgtaactagagtacagcatccaaaccaggaagctgacactgggacactggatagctcttactcaccagttcatacatgctgtcgtctgtgtgcatgcccttaacacagctgtgcgattttatcacgtgtgtaggttcacgtaaccaccaccacagggagatacagacctgttccatgacaaggctcccctgtgctagccttcttataggtgcaccctcatcgccatctgtgtctgttgactaccactaatctcttctcaatctctatagttttgtcataagtcaaccccttccttttcataaagggtttatgaatttccctgatgaaaaagtacaaaatgaggccaggcgtggtggctcatgcctgtaatcccagcactttgggaggccaaggcgggtggctcacctgaggtcaggagttcaagaccagcctggccaacatggtgaaaccttgtctctgctaaaaatacaaaaattagccaagcatggtggcacgcacctgtagtcccagctactcaggaggctgaggcaggagaatcacttgaacctgggaggcagaggttgcattgagtcaagatcacgccactgcactgcagcctgggtgatagagcaagtctccatctcaaaaaaaaaaatttacaaagtggggccggttgtggtagctcatgccagtaattccaaagctctggggaggaagatcacttgaggccagtagttcacaaccagcctgagcaacacagtgagaccccatctccacaaaaaagttggaaactagccaggcatggtggcatgtgcctgctgtcctagggagcctgaggcaggaggatcacttgaggccaggagttcacaaccagccgaggaacatagtgagatgcccatctccacaaaaaaattttaaaactaggcaggcatggtggctcgtgcctgtggtcctagctgctcaggaggtggaggcaggaggatcacttgaggccaggagttcagggttacaatgagctgtgatatgccactgcactctagtgtgggtgacaaaatgagagcctgtctcttaaaaagaaaacaaaaattacaaaatatactcctttgagaaatcgtataagtaactaaagaaactttacggtaatgcgaaagctatgtgcattcagtagaaagcagtcaatcctctcttgtgatgctgagtagcagcagggagccacagctgccagtcagccacacagtctcagtttagggtattttcagcttacagtgggttatcatgggtcatgagttatgggaatatcatgatcagagagcatctgtaaagtgagaaattagatttgcttgatttcaagtactttatgtatttgtagtggaaatttgatttttaacactgcttttccttttctctcttcagggcattccttaagcattcagcagaacttgtatacatgctagaaagcaaacatctctctgtagtcctacaaggtaactaaagtaactcctgaaagcaccatgaccaccataccagccagccttggtttactgcttgtccccattcaagtaaatcacatcagttttagctatttcttatttactacagtaccatcaaatacattacagattttgcacatcatttgagtaaaacagtggcacaggctgggcgcagtggctgaagcctgtaatcccagactttgggaggtcgaggcgggcggatcacttgaggtcagaagtttgagatcagcctggccaacgtggtgaaaccttgtctctactaaaaatacaaaaattagtcaggagtggtggtgtgcgcctgtagtctcagctactcgggaggccgaggcaggagtatcacttgaacctaggaggcggaggttgcagtgagcagagatcgcaccactgcactccagcctgggcaacacagcaagactcaaaaaaaaaataaataaaaaccagtggcacaaggactgcaaatagaagaatagaaagtagtccagtttttaccctttattaaattatccttcctattttatgggaagggtgggtcccatcccctaatggattaatacttagtgttaattttgacagggcattctctctctgtaattttgctgtctaatttgtacaaatttgttttagtttaaataccttctggctcatgctagattatgactctaaggaagcagtttgagatgaagaaatttagactgaactgctgaatagctagtaatgtaatatttggtaggaataaacggtgatgtaaaaatctttcagttaagcaaaggataattacatattaaataacttacagctaatagaatttgtaagtttgcagataaagttcaatagactaaaaactaccttcgtataatacagtagtaggtcctttgtacccatggcttccccatctgtggtcaaccaacccaggactgaaaatattggcgggggaaagctttggccgtaatgaacatgaacagactttttttttgttgtcattattctctaaacagtatagtataacaactgtttacatagcatttacattgtattaggtgttataagtaatctagaggtaacttaaagtgtacaggaggatgtgcataggttatatgcaaatattaacatcattttatatccaggacttaagcatttgtggatcttggtatccaaaggaggccctggaatgagttccccatggatactgagggaagactatatactcatgttgcatagtatatgaatacaaaatgttgcttaagcttgcagaagtactttttttttttttgagatggagtttcgctcctgtcacctaggctggagtgcagtggaacgatctcagctcactgcaacctccacctcctgggttcaagcgattctcctgcttcagcctcccaagtagctgggattacaagcatgcaccaccacgcccggctaatttttgtatttttactagagatggggtttcaccttgttggccaggctgctctcgaactcctgccctcaggtggtctgcccacctcagcctcccaaagtgctaggattataggcgtgagccaccgtgcctggccaggcttgcagaagtacatttaacaactgccaaacttgattgactttaacaaggcaaaaatctttaagactcttagaaaaaaatcaaatagtaatgtgtcatataaagtaatcctgaactgatacagtcagagtgtgtgtttaactcacaaatgcatgcagagcctaataatcacaatttctctcatccagtgggtgttctcatcgtattggagaaccctactcatcctccatttctccatgcatttgtaatagaaaaggcctcagaagtagcactgaaccttcattttactagcatttttatatacgtttatttttaaacagtttgttaaaaatttacatactatggaattcacccatttttaatttgtaattcagtaaattttagtaaatatacagagtctagttttggaaatttttcatcaccccaaaagtcccagctccaggcagccactaatctttctgtctctagattttccctttctgggcatttcatataaatggaatcatacaatatgtggccttttgccgctggcttctttcattcaacatacatgtttttgaggttcattcatgtagtgtgtatcagcaatcttttcctttttatttctgaattgtattccactgtttgtaaatgcattttgcttacccatttacctgttgatggacatttgggttgtttccactttgtggctgttatgaattatgctgcttcatttatttagatctttcattttatcagcagtgttttattatgtaagtcttatatttattttgttaaatctcttaagtattttatttttatgtcactgtgaatataattgttaatttcattttcaggtttactatgtactcagattgttgtgtacagaatttctgtaaccttactgacctcatttattaattctagtagttattttgtggattccgtaggagtttttacatacaggatcatattgtcttcaaagacagtttttacctttttctttctgatctgaatgccttttattttctttttcttgcctaattgctctggctagattctccagttcaatgagatggagaagtgtagagaacagacatccttatcatcttcctgatcttagggagagagtatccagtctttcaccagtgaaatgggaataacattaattgtaggtttttgtggatgtctctgatcagtttaaatatgtttacttttattcctaatcaggaatgaaggtagaattgtatcagatgctttttccgcatctaatgagataatcgtgttggttttgtcctttattactgtggtacgttactacaattgacagatgttaaaccaactttgcattcctggataatttggtttactcatatttttattgatttttacatctgtaatcataagggatattggtcaatagttgtcttctgatttccctggctgactttgatagcgtggcaattctggccttattggaaaggacaacaactataaaagacaggagggaatcgtttgccacagcttcagttggtagtgaacagtcccactctccccattcacttctcagtattgccatgtggcctgtcagtagaaagattaccttatacttaataccttgacaaaagagcagtagaatggagtctagacggattttctaccacaaaccattcgaatgtaaaaagtatgagtgatgagcttctattatctggcaaatatccatgtataaaagaccatctcctattaaatgctaatttagtttatctacaagtctgtaatattttagagttgctggaatccagtaaaatttccttatacagatttggaaggcagcctaggtgtgcagaatactaaattatctagtttacctttccttccctttctctctcagcatttttctatgttgtaatcattttctttccattttattaacagaggaggaaggaagagacttgagctgttgtgtagcttctcttgttcaagtgatgctggatccctattttaggacaattactggatttcagagtctgatacagaaggagtgggtcatggcaggatatcagtttctagacagatgcaaccatctaaagagatcagagaaagaggtaacaaaatcttgatgcctttttatcagtctttaaggatacacaaaataaaatttgtgtcattaaaagatgaaggggcttttaaaaaatactgtatttagtacaacttaatttccttagtccaaagctaactaatggattagagttcaaattgatgtacttattataaagattatcgtaactatgaaggtgaaatttttaaaagttgtctattgaatttgtctaagtggaaaactactgaaaaaattctgaataaaatactgaaaaacagataacaagcacattggctattttgaaaaatcacttttggaatatcatattttcttaaaatgggatacataggttaagatgaaaagtttgagagggccacctttgcaacagctgtggagttagtggctgcctcggatctctagttaggctgcggaaggccttacaaatatcttaccggccaggcaggtcagtcagatcagtttttagaaggttgtttcagagagcgccatttgacttgtggtgtctcataaaaaatagtggtcacccgctactgcacttggggacacaccacgtgacctaggctcatcccaaagtgttttctgaaatatggggatgttttctggatgctgagcctacaggatcaaccaaacattagagaagtttggttgatggttttgttttgttatataatctaaagaattgtttctaagacatgcttaaacacatattttgctcttcccccttcatatagtggcaacccgctcaactgtgtgctttgctgtttcaacttgttacatgtactgggcaaataagggttgtgatgtttatcacggttgaatgttacttcttgggtttgatagatgtgtatagctcagcttagaaggcaagtgttttaggcttcgatgttttctcattcatctcttctttaacatcagcagtacattttgaagtaaatgtgaacggctgaaggataacattaaatgatcccattgtctctttgtatttgccagtctcctttatttttgctattcttggatgccacctggcagctgttagaacaatatcctgcagcttttgagttctccgaaacctacctggcagtgttgtatgacagcacccggatctcactgtttggcaccttcctgttcaactcccctcaccagcgagtgaagcaaagcacggtaagcaaccctgtggctgtggctacgttttccctgtttttacaactttatcgaggcataattgaagtataattcactgcctatttaaaatcttatgatttaaaattcttactgccattttcagctgaaatttctgaatggattattttgaagacacaaaaatctaggaaattatttttatgaatgaacattttttgttttactctaatgtaaatgttttgtagtaaacccctttaaagatgtaaattactttaaccaccttaaatgtcatgcttttgtatttatatttcacatttgggctattgggtagtaaaaaacaaaagccctgttacacgacatttatttcctaggtcagtaggataaaaagttgtacaaaacaagattattttccttcacgagtttgaagtttctggtcacaattcattgatgtagaggatttatgactaagcagggtctcaagccaaacttgaaaccattctgaaccaaagtgccatttcacccacctcgaaccaacaacagaagctgacaaatgccgtggagaccattgagagaaacagaaaggggcagctcttgtggaccttcaggaagcctttctaggaagaggattgccctcatagtgagctccggggtcttcagcctcagccgtaaggccctgggctaggcagtgtgacctagggagcgggaaacctgagttctggccctggtctgggaaaagtgctaggcccatgttccactcaggcttcagcctgagagtccaggttgctaacctgtaaaatggatctgtcaaactaacacttatgcctttagtctcattgtatgaggtgaaacattttgtaaactgtgaatcattatgcaaattttcctaaagacatatgaattattctggatttgttggtataaaagacaaaacacactggtcagttaaggagctgattttatttaggctattgcaggagggagaacttaattaatgggcatcccaaagaaaaggacaaggcctgggattttatagtcagaagacaggggaatcaggagggagggcagtctcagtccacaggagccagttctcaggacacaaaaggcaggagagattgtccagcattgccacttttggggaacccagggctcaaagaaactcaacaccgtcagcctgtctctacaaaaaatacaaaaattagccagacatggtggtgcgcacctgtggtcccagctactggggaggctgaggtgggaggatggcttaagcccaggaggcagagattgcagtgagctgagactgtgccactgcactccagcctgggtgatagagccagagtctgtcccctgcccaccccaccaggaaagtttgacctttccagatactgtgctgagaaccagtgatacaggcttagaggctcctgaggcatggaacgctcatttgttcctaaaatacatgctctcccagttgcttgtttttatttttcgtcaccataatcattcttggggcccctctctgcctcgagctaggctttccccctggccttgtttgcctccttcagctcttccccattgtctcccgtcactaccccgtgcgcacacagtgtgagcctgcaaaaggtgcgtgaggcgaggacaaagactttggggtctggggactgggcagtgcatgggtgggtatctgcgtggaggactcccagcccccagacaccactgcctctgctgcttggctgatgctgtgtgtgcggacagacttctcaccaggaatgaacattactgaattgtattgagggagctgtaaaaaatactttctacaagtatttcctctgctttccctgttcatgttctagtgctctttttaatttggctctttcaaaagccttttctgacaaatactaacatgaatccccctctcccttcctccctagcaggaactggtcattgtctaagggtcgtgattcttaaccgttctcagccccttccacacaggcaaaagcccaaagcatttcttccttttttttccattctgaggccaccttaggtgctagtggccaggtagtgtttatagaaaatctggtctctcttgggataaatatttttaatttttaccttttaaaaaagagaacatctttttttttttttttaagacagtttggctctgtcacccaggctggagtacagtggtacaatatcagctcactgcaacctctgcctcctgggtccaagcactgctctcgcctcaaccacctgagtagctaggactgcaggcgcatgccaccacgcctagctaatttttgtatttttttgtagagtcagggtttcgccatgttgcccagtctggtcttgaactcctggactcaagcaatccgcccacctcagcttcccaaagtactgggattacaggcgtgagccaccgtgcttggccaagaggacattttctatatacttactgaagggccattaaaacacgtttgggttcatgttttactagatttcagctcttaacagtgtttgaagcaaatggattgtttttaatccatgtacatgatgaaatgtcaagtaactaaaatttttttttttttttttttgagacagagtcttgctctatcacccaggctggagcacagtggcatgatctcggctcactgcaacctctgccttccaggttcaggtgattctcctgccacagcctcccgagtagctgggactacaggtgcacaccaccatgcctggctaatttttgtatttttagtagagacggggtttcaccatattggccaggctggtcttgaactcctgacctcgtgatccgcctgccttcggcctcccaaagtgctgggattacaggcatgagtcaccactgcgcctggccaaaactgttaagagtatgtgtatttggtgcttaatgaatttttacttatttgaaatagaaaattttgtaaaactttacaaaatgccctgtgctgttacacagcttagccatttcttgatgattcaagccgccactgtgccagggaatgccacctggctgtgatgtagtcatggcctcctgactgctatattcttgtcctaataacattcattgtttgcctttttaataatttccaaataaattcttgggggtttttttttggtagaaaatttggagagtactgaaaggtacagaacaaagaatcagacatttcccatcatccagcgactttgtgtctggagttatttcctccagcgaactgttgtgtatacactgctgtggtagcctgctgccatcaatcagctgagatgagagtcctttctccacattgctaaatgtgactgtgcttcatagaaatggtctgggctgccttccagaggagctccatgtcttcctcacaatgcggtggttggctgtcaccctgtagccttgtgttgcctcagtttactgtggtgggaagccagataactaggctgcacccgcccagagtccgggctagaggtggactcctgtgaaggaggggtctcctgtgtacatggtctccatggttttagccacatgctaggaccacagggagttgatcccttccttcctaccctgagtctgtggtctgtgatttgagatcactggctcagtgaagtgtagctccccacttacgaagtaagttataaaattggtggcagtgatttccatccaaagattttgttaatccacttaccaacaggtaactacttaaatgtactgaccgtgtgctcataaaagtaaaatactgtaattatagaaataaattcaacatgtttaagactttctagtatcatgttagtgaaacttctcttaataacattcttattgcccaaagggcacggcttccttggggtcctaaggcagagggcacctgaaaagcacactccttgttcatggggactgtggggccctctgagctcaaaggccaggagcgtctcctctcttgaagtgaaagtgccactctggtgggttttgagggctgcagtacagaacatttaacctgtgtaatgatgagtggctcatctgaaaaaaggcattcatgagagaatctttagttttgcaaatatttatttatttattttgcaggaatttgctataagcaaaaacatccaattgggtgatgagaagggcttaaaattcccctctgtttgggactggtctctccagtttacagcaaaggatcgcacccttttccataaccccttctacattggaaagagcacaccttgtatacagaatggctccgtgaagtcttttaaacggacaaaggtaaatcacagctaacaaaacgtgatgttggctcacacgtaaccaaacacctctttttcagaacagagagcgttaaaagtaaaggcacttccaagagtaacactgctaatgcgggtttctgaggggtcattccctttttaactcaaatgactgtatcccagctttcttcctggtgtctgaggcccacaaagtctcagtacctgagagtgggcagattgcagctttgagcctgcaagcctgatttactaaagccccatttatccatttcttgatgattcaagccgccactgtggcagggaatgccgcctggctgtgatgtagtcatggcctcctgactgctatattcttgtcctaataacattcattgtttgcctttttaataattcccaaataaattcttgggattttttttggtagaaaatttgcagactactgaaaggtacagaacaaagaatcagacatttggcctcctgactgcctctgttcagtttgccattgttcttgatagaatcggccaggtctagtgttttttctagcccgtcttagaacttatccttaagcaaattagtggataggaggtactctcatcccgcccccattcaggctgatagtaacagcctaggtagagtcaacacataaaaaagtgtaattccaggggaggaggattagaataaggacacaaaggaagggaggaaaatgttctttgaggctgaaattccattaatttttcatagtattgagtttatatttgccattgcatccttcaatctttctaaaaagggaatccccggaacataataaaatctcttctgtatagaaaagctacagctccacactaagaggaatgccgtctgccttaaagaatggaatcatcagtgaccaagaattacttccaaggagaaattcattgatattaaaaccaaagccagatccagctcagcaaaccgacagccagaacagtgatacggagcagtattttagagaatggttttccaaacccgccaacctgcacggtgttattctgccacgtgtctctggaacacacataaaactgtggaaactgtgctacttccgctgggttcccgaggcccagatcagcctgggtggctccatcacagcctttcacaagctctccctcctggctgatgaagtcgacgtactgagcaggatgctgcggcaacagcgcagtggccccctggaggcctgctatggggagctgggccagagcaggatgtacttcaacgccagcggccctcaccacaccgacacctcggggacaccggagtttctctcctcctcatttccattttctcctgtagggaatctgtgcagacgaagcattttaggaacaccattaagcaaatttttaagtggggccaaaatatggttgtctactgagacattagcaaatgaagactaaaatagggtgttttctgaacattttgagggaagctgtcaacttttttcctctgaattaacattgctaacctaggcgtttgaatctctaataactttatatgtaagaataatagttggaatttgcactaatatttaaaaacatgttgaatcatgcttctttcacacttattttaagagagatgtaaattttgttcctgtcctctttctgtcattacaggtctggctcttgtaaccgtgatcaaactgttcatgttgtctgctacatttttgtctccatccatttttcctaccacctcctgaaggctatctgatagtcagtcacattagcagccccaggcagcagacaacaggaaagttaggaaatttgtgtttcgtgtcatttttaggagcatctgataaaacctccagcaggttttaggaagtattcatgtatttttctggttactttctgtcgtctctaattgaactcacctgatgaaggttcagtgttctggggccagaatttatgattttagatcaccttctttggaaccttagatcactgtgttttgaaatcatgagtttgcttttaacttcatagggtcaactttaaaatgatatgcactgttaattttaaagcatttgctgcagataattaaacttagaagtgcctttgactttaggatacaaatattacagaagaaaatataatttcactttttaaaattggggtgggaaaatcccattgcatatttgaaataggcttttcatactaagcttcatagccaggagtccccagagtcttgttcctctgaaagccactggggagtggcctctggggtgctgattccacagaggtgtatgctgtagacaggagagtgccatctatgccaaaactcgccctcaaaaacaaacaaggcttgctgggaggcgtgctgggcttggccatcagtatttccagtgtggtaaactattgctggcacttccccctggaaataactaatgaggttacgagttgggcacctgcacagatgtccttctctcatagttcctaatgcttaggaatagaggagaaataaaaaaatggattctctcaaaacactgccatttgaatagcgacagaagtgctcccccagcccccaactttggacagcaaagttgaggagaatgagcagacacagttgtttgcttgatctgaatctctctaaagtaaagtatttccaaactgtgtgacaagagcctacctaccactgtagcggtcaaagctgaagcttcttacagcagtgaaacggggcaccacctcccccacactcctcattccccgcttaaaacatggatactttcaaatttgactgtttcttaaactgccatcctaagatatggaaaatttttatagtaaagtgtctagttagcttatttccttttctaaaacaagtgttttcaagataactgtattttacctttatatgtactgaatagctgtttctttttgaattatttgccttttaaaatttgataatgtctctggatataacaggacaggagttcttaaaaaatatcttaagaaattcactttatgggtaaacccaaggtttttgccaacttgttgcctagaaaataagggctagtttcagtttatacaaatagaattattaaacattttacagtccttgattagaaaccagacccaatctccttataacaccacagcgtatcctgccattgacagtgtaatcacaattctccctttttcatttagctgcttttttattattactaaatgttttggattgagcatttttccctctgtaattttcttccttcacgtttattttaactcttgtagtattttattgttgttaatttacaagtttaaaaatattaggtactattaataatggttaaaaatagaaaaatgcatatttttgtatgataatcaaatgtaaaatacttttatttttgctggacagttgttatatcatgattattgtgctacagtttattgtgcataatatgaaaaacaactatgacagccttcagtcgggccagggtgaagctgcttataccacctctgccgtcagagggacatgtggtgacagcagtggtgtggctgcacagggcgcactagagagagctcagcacccctgctgcccgccagcagagcccgtgctgagggaatgccgcacagatgctgatgcactgggtgaaatttctagtattgaacgtaaaggtgtacagtgtcttgctgttattttatgatggaaactgattttgaaaccaaaaatagctaactaactttatttaaggaaaggatattaatttgtactaacagagggtgaaagctgttcacatttgtcaacaaaatctgcttgctgcagtagtaacctcaagtggttaaaacttgatttcccgagaaaactaaaacctttgtgcctaaaattgatgacttgagttcaagtgggatgagcaagaagatgtgttatcttgttgttcaacagtattgaatgtgaaggaaattttgatggcttaataaaattccacagcgactgtt

SEQ ID NO: 49 - DNA, 100388 bp, Homo sapiens
gccctggccaaggaggaggctgaaagagcctgagctgtgccctctccattccactgctgtggcaggtaagctcagatgcgggtaagcacaggtgaagggaggtcaggtgcaggtatcctcaggtgtgggtaaactcaagcgtggacaaactcaggtgcagataaccacagatgcagttaagctcaggtgttggtaacctcaggtgcaggtaggctcaggtgcaagtaagagcaggtgcaggcaagctcaggtgtgctttctggggcctgttactcatctcctcttgaggctggctggacaggaccctatggagcagctggtgaacctgtgttcagcctgggttccaagaggctgtctcagcagaagggacccaccaggttgattcacagaggggataagtactctgtcagctggtctcaaagaggctgaaaccctctgagcttccctcagggccagcttctaaatccaggtgccagggatctgctcaggagccccggctccaggcctcaacctcttgcctgtcattccttagcatcttactttgcttcagggaaaaggtgcaccttccttagaaccccagaaaatgctgaagttctaggagagacagggtttatacttgtaagcctttatcagctgatatttcacctgtgaaagccttggggaagagattggttacacggaacaggatcaggaggggagattactgctccctctcactgctgggagcagtgcaaactggtttctggaaggcagttcaacaacatgcagcaaagccctgcaagtccacacctaggaacccatcctgaggagcgaatcctgaagggatgccaacattgacacagctttgtgtgctaccgggaagcacagcaaacaacccaaacgcccagaagcagagggctggacacatcaatcatggtctgtccataggatgaaacatcacgcagtcacttttaaaatgacagagaaaaaggcataataaccgtacagaattattgtgtttttcattacacacacatgcacctgtctaatctattcacggaaaaagcctagaaatacaaggaaatatcagttgttttaggatggaggccttatgggtggtgtttatttattcttttgtacatttctacattttttgtcttctttaatcattttctatcacaaattaattttcctttttttcccagaaaatatatcttttgtactttttattagtacatcatagttgtgcatattgtgggggtacatgtgattttttggtgcatgtatacaatgtgtatgtttttttaaaccttagcaaaaattagcaaaagtagtgggggaggtagggaggaatgaaaatatttgcagggccaggcgcgatggctcatggctgtaatcccagcacttcgggaggctgaggcaggcagatcacgaggtcaagagatagagaccatcctagccaacatggtgaaaccctgtctctactaaaaatacaaaaattagctgggcatggtagtgcgcgcctgtagtcccagctactcgagaggctgaggcaggagaggttgaacccaggaggtggaggttgcagtgagccgagactgcgccactgcactccagcctgggcgacagagtgagactccatcaaaaaaaaaaaaagaaggaaagaaagaaagaagaaagaaacaaagaaagaatatttgcataaattgtgtttgcgttgacaagggataggaactgagaatggggaaggaagatgagacacattttctctgtctgaatcagatatttagggaggaattaagaacggagccctgcctctctatgagtgcacttgatgaatacgggactgattctgggaaagactgcctttggtcaggttctcaaaacaccattgttttgaactatccagcagcagttttaattcatggcatttgcaattatatttatagcataaattgtctattctctgcagtgtattttttagccctcctcccccagaaaatgtaattggaaatatcaactcatgttgaatgtgtttgctgtacctgtttatgttttattgattattttctgggagaagtttggagttgtgtttggtttggctctgtgcaacctcatttatttgctctgtaaagctgataagcacaagaagtgaaatgacactcaggcattttaagatgcgagtcatcttcattctgaactaagtgaaaacaaaacagattttctatcaacctaaaatcctcctactgggggcagtagatgtttttagaaaattggctttggctttgattgacaatgtttggaagatgtcctataatttgagagtgtatgtgtgtgtgtctgggtgtgtgtgtgtaaatgctggacctgggaagatggaagccctcagccaggagaataagaggacacaatacccccaagccttccatgacctagagattaaggggatttaacgtcttaaaacctccattaagtagacagtagcaagagacatgttgccctcagtgatatgcaaaggcatatctgatgggtcagtatctgccatcctcctcttttgcaagctctgaggttagactcagccatgggtgaaggaattacagcatccattgggagcaggcagagtccaggaaagagatttttctgttacctcagatgcccatcgcgccaggagcaattttcccagcctcttgtagaaagcacatattagtatctatctcactgcttttcagaaactgtatcttcaattgctaagtggggaaaaatgcatttacaatgctagagctgactttaagaaaacaagttaacatcaggccacagcactcccctcccccgctgctgagaccttgtcgctgtgcaccttgtcccctccctcacggcttctggctcccgctcccccaatccctggccccctgtctgcccctgccattaaagtggcaagcacaggtatcctcctccctcatcacaacttatccatcctgtgtctgctcccccagggtgggtaatgcctgaaatgccttaaggtaggggtaacgctcatggcaggtggccctggctctcctggagacagggcacaggaatgggcaaattcttcaggcttggtgaggtggaaagcttgctcctcgggaatcatggccacagtgcccttttttgtttgttaatcattaaaaagcatactacatgaatatataaagttggaaaaccccacagaagagccaagtgaagtcctgcttacacactcctcctgatccctactctcccgtgctgtggaccatgcttagtgtttgacgtgtattattattatttttgtgtgtgtgtgacagagtcttgctctgttgctcaggctggagtgcaatggcatgatctcggctcaccgcaacctccgcctcccagattcaagcgattctcctgccaactagctgggattacaggtgcccgccaccacgcccagctaattttgtatttttagtagagacaaggcttcaccatgttgatcaagctggtctcaaactcctgacctcaggtgatccgcccacctcagcctcccaaaatgctgggctgggattacaggcgtgagccaccacgcccggcctgatgtgtattattctagacctctgctgcctaatagaaatagcacacgcgccacagacataatttcaaactgtgtagtagccacttaaaaaggaaaagtaaaaacaaataagtgaaattaactttaattctataattcatttaacacaatatatctaaaatatgattgtttcaacatgtagtcaataccaaacacatactaatgaggtattttatgtctttctttattgttctaagtctttgaaatcctgccacacacctcgttttcagctctcatgtcacagtgaacattagcgtgccatctcacactcacagcatgtctccattcaccctggccacatctcaggtgcgcaacagccccaggtagccagggtctaccatgcgggacagctctgctcttgaatatcgggaagtttgttcctgtagagctggatcacatcggaaatattttactacgctttttttttcaattcataatggagacgtttacactttagagttctgtgttagtcttgttcatggttgcatagtccatgatttggtacgtcgttaattggtttaatcagtcccccaggtagactaacaaaaaagtggaggtttccaatttttcacttagcttaaaatacactgcaacaagcatccatacattgcctatttacatgcaaaagtatttccaggtgatcgatccatggaagtgaaagtgctgggtcaaagacaggcatgcaccctttgctctgagaggcaagccagtactcagccaagccggccaccaatttgccttggggtttggacgttgttcccttagaggtaaaagcaaagagttgggctggataccctccatagttcctaaatgctcagttccatggcccaaagggtggtgattcctgccaatgcctttggtggacgtagtcttgggtgggtgggtgggtgacagctacctgctcccactggagggcaggcctggattgggcagataagcaaatcaaccacacacaccttgtctagataagcagaaaacactcagaaaagaccccaattgttttatttgtaaaattgctctttggctaattttcatgaatgtggatcattcattaaacgttatcatagaaaaagagcagagcaacaaaggggcccggcagtctgattcccgtgctggcagcctccaccgtcacgctgagctgtggtgaatgcctagggtttcacccgcctacccctcactcctgctggcgtgcaccctttccccaccctggtggccccagcaaacatcacagtccctgagggccaggaggcttgggtccccagatgcccacacctgacaggcctagtgcctgagcactctggtgagggacttccctggaccatgggagcactgccagaggaggctcgagggcagggacctggatgggtagcaaaggacagagaacatcgggaaaggagagggtactacctgtgggaaccaggcaggcacaagaggctggccctgagcctctgcgcatctctcctgcagacactggctgcacctgcctagcctctgaaacccagaccaggcactcaggcaatgaggggagctccttaacacaacaccttcccaactgctgtgcttttcggagtgagctggccaggtgatgttggccaaagcaggaaggggagctgttgaggtgccccaagatccttgctggaatcctcaggttcccagacaatcagggtagacccggtgatgggagaaggagatggggacacacatggatccgaagctacaagattctgcttctctctcctgtttttgtttattcttttaagatgttttattgctaaataaagcattttaaaaagtgtataagatgtctgcacatagtttagagaatgataaagcagatccttgtgttttaccatggggccctttcccactgcactccttccctcccagaggcagcactgcctgacttctgcctggctcgttcctgcctttgctctttctttctctctttttccctcccttcctccctcccttccttccttcttcccttcccttcgtttcttctttttctttccttccttccttctttcttttcttttcttttcttttctatttttatttttatttttttgagacagagttttgctcttgtcacctaggctgaagtgcagtggtgctatctcggctcactgcaaccttcacctcccatgttcaagcgattctcctacctcagcctcccaaatagttgggattacaggcaactgccaccacgcctggctaatttttttgtatttttagtagcgatggggtttcaccacgttggccaggctggtctcgaactcctgacctccagagatccacccaccttggcctcccaaagtgctgggattacaggtgtgagccactgcgcctggcccctggcttttctttatgtttcatttagtttagttttgaggtttacatattttttatatttatttatttatttattttcaaatggagtctcactctgtcgcccaggctggagtgcagtggtgtgatctcagctcaccgcaacctctgcctcctgggttcaagctattctcctgcctcagcctcccgagtagctgggattacaggcgcctgtcaccatgcctggctaatttttgtatttttagtagagacgaggtttcaccatgttggccaggctggtctcgaactcctgacctcaggtgatccacccgcctcggcctcccaaagtgctgggattacagacatgagccaccatgcccagccatatttttaaataatttattgagatgaaatttgtatcacataaaatggaccattttcaagtgaccaattcagtggtatttagtacagtcatgaggtcatgcaactaccttgtctctctgtccttacttccaacactacaaagtaaaaccccctacccattaagcagttcctccccatttcctctccctgtggccttgcccctggaaaccactagtttgtgctttgtctgtatggatttatctattctggatgtttcatctaaatggaatcatacatatgtcaccttttatgcctggcttctatcagttagcatcacgtttccaaggttcacccatgtggcatgcttcagaacttcgttcatttatgtggctaaataatattcttttgtttgtataacatataccacaatttgtttatccatctatccactgatggacatgtgagctatggccaccatttggctgttatgaatagtgctgcaatgctacatgtttatttgagtctctgttttcatttctcttgggtatatacctagcagtaaaattgctgggtcatatggtaattctacatttaactgaggaactgccaaatcattttccaaagtgactgtaccattttacactttcaccagcaatgtctgaaggttccaattcctccacatccttgcaaacactggttactatttttttattttgggatgtttttaattataatcatcctagtaggaatgaagtggcacctcatcatggttttgatttgcttttccctaatgtctaaagatgttgggtatcttttcatgtgtttgttggccatttgtatatcttcattggagaattgtctattcaagtcctttgcccagtttttaatcgggttgtctttttgttgttgagttggaagagttcttttatatattctggatattagacccttgtcatattttgatttgcaaatatcgtattccattctataggttgtgggtttttttcctttcttaataatgtcctttgatgaatttgatgaacagtttttcattttaatgaagttcaacttacctgctttttcttttcttgttcatgcttatggtatcatatctataaatccatcgatcatgaagataatgaaaattcacacatatattttcttttaagagttttatggttttaggtcttacaatttagtctgatccattttgagttaatatttatagctagtgtgaagtaggggtccaaattcattcttttgcatgtggatatccaattttccaagcactattagttgacaagactgtcttttcccccattgaatggtcttagcacctttgctaaaaatcacttggacatagatatatggacttatttctgaaatctcaatcttactccactggcctgcatgtctgtccttatgctagtaccatacttctttgattactgacgctttgaaattctgaaatcagaaaatatgagtcctctaactttgttctttttttcaagattgctttgtcggccatgtgcggggatcatgtttgtaatcccagcactttgggaggctgaggcgggcagatcacttgaggtcaggagtcggaggccagcctggccaacatggtgaaaccctatctctactaaaaataaaaaaaattagccaggcatagtggcacatgtctgtagtcccagctactccagaggctgaggcacaagaatcacttgaacctgggaggcagaggctgcagtgagccgagatcatgccactgcactccagcctgggcaacagagcaagactccatctcaaaataaaaaaacaaaaaaaaaaaccagattgctctgtccatttagcccattgcaattcatgaatacaggatgtctttccatttatttatttatgccttctttaatttctttcagcgaggtcttgtcactttcagtgtacaaggccttcacctctttggttaaatttatttctagatactttctgatttttgatgttattataaattgaattgtttttgctgtacagaaatacatccaatttttgtatggtgatctttcaccctccacttctgctatattagtttattagctctagtagcttttttgtggattctttgggagcttttttaatcttttttttttttttttttttttttttgagacaaagtctcactctgtcgcccaggctggagtgcagtgtcataatctcagcttagtgcaacctctgcctcccaggttaaagcaattctcctgcctcagcctcctgagtagctgggactacaggtgtgtgtcaccacacccagctaatttttttatttttagtaaagacagggtttcaccatgttggccaggctggtctcgaactcctgacctcaggtgatccacccgcctcagcctcccaaagtgctgggattacaggcatgaaccactgtgcccggccccttattgttttattttgaacttcatctgtatttctaaataatgcattgttgagcttcacctgcttttgaactttatacaaatggaatcacactgtgtgtatctttgatgactcatttcttttcttctgtgctgtgtttggagagtcacccatatggtagctgcagtttgtctgttctcgctgctgtgtgatattcctgcgggactatacggcaatgtacttgtacatgctaccgcggctgggcatctagacggctctgtgttgagtgcttatgaacagtgcggtctcctggaagatacatacatgcacaagtatatttccagtaaacctcagtgtggaagtgctgggctgtggaggatatgcctgctccacttcctgagacaacgagaaatcgttttctgtcctcctgaaaggggaaggctcaaaagcaaatgcccattttggagaaaacattttgaatctgccaaaggagaccctgagtaatgagggacagggctgggggtccaggtccggctgcctggccgcgtggtcggcctgggctggtggctccactgtgaccctccatctcctcttttggtgccactcgcctcccagagcccctaccaaaaccctaactcatccacagccccagtttcttcgttcgtaaaaccaggagagctggtggtctctgcagacttacaacgcaccgacaccacacctttattctgtgggaccgtcacggtggtcaccacagttaagaaatgagaccctgcactctgccttgcccctgctgttcccactcccaagagcattttccccagagctcctgcctggaccaatcctctcatccttcagggctaagccagtgtcccaccccaccccaccccacccctcaagagcctcctcagtccagagagaaaaactttctccctcatcccggcccctcctagaccactttatgggggcttgggcccacctgggagctccgaagggctgagtccccttgacatatctggagccagcagagcccacctcgtaagagggctttgcaagctaacagttgagccacatgcatgctgggctttttgtgtgacattcaaagtggtccaggttacaaaggccccactgaacttttgaagaaggtgttttttgttttgttttgttttgttttcccataatcctcccaagttttacaagctgagttgtgagatgtgtgggaacgttcatctataaatatatgagcagcccagacactgaccatgagtcactggtcaccacagaccacactgggtcaggacagccccagaggaacacagcgcacatgtgaacctctttggggggttctcccgccctcaccaccaagtgccactccttattcttctctgtaggaccactcccacccggtcagcctcccaggaacaacccctgctgctcccaagcccagcccttcaggagtgcccctccgtgcccttccctgcccttcggatctgccccatcctgggtctccatccctcagagccgactgcagctaactggccaacctgctaaacaggtggtgctgagatctgagaggcgcttactgacttaacatgtgcacgctggtccccagcagccccagaagtccatttaacatggatagtgacatcgtccacaaagggcagagtgggcaaatacttgcaaaagccttggaaaaacacaaaccaagatttacgtccagcactgttagggctgtgagttctggagtgaagcatctctgtctcattgtgtccgatctccagcacagcaggcgaggcccgggtttcactctcagctctgccatcccactggcctgctgcttcctcggccatggatgagggaattgcagacaatgtcatcagtccacccaacctacccaacagatcccaggcattgaaacagaagcagaactattaccctcgttgcacttttttttatcagctaatgcttaagaaacttcaaaactgtttactgaatacaatcgctgctagacattgggcttgaagttttacacacttaatcacacttaatccttacagaaaccatgagaaatcagcctcattactccatgtcatagacaagctaatcaagactcaggaaagttaagtaagttggccaaggtcataaagataagaaatggtggatctgggagctgactcaggtacgtctaaagcccaagttctccttccaccacactgtttactgtattttttttaaaaaaagagccactttcaaagcttaaactcgaagaaatggccttaatagtaaagctttccagcaccattcagacttgttgggaagattttttccagggtgcagtttcttttttttttttcttttttgtttttgagatggagtctcactctgttgcccaggctagagtgcagtggcacaatctgaggtcaccgtaacctctgcctcccaggttcaggtgattctcctgcctcagcctcccgagtagctgggattacaggtgcccaccaccacacctggctaatttttgtatttttagtaaagatggcatttcaccatgttggccaggctggtcttgaatccctgacctcgtgaccggcctgcctcggcttcccaaagtgctaggagtacaggcatgagccaccacgcccagccccaggatgcagtttcatatggaaaataccacatggaatcatttctagaaagcaagaatcccggggacagccacaccggagaacaccatgcagctggttgaagggtgaggaagctgtctgtgtaatggctcaaaaagactcccataaatgttgctaaagtttccttttaaaaagtcctttacgagagcatgtgtgctgagaaccaggaagaaatagctgaagggaacgcaccagtgttcatgggggttactgctaggggctagggttgcagaggaaaaaaagataatcacttttttgtttcaatatttccgtatacttttaatttgttccattgagcacatactagtttagggttttttcatttgttttaaattttaagcaaagaaaaaccaaacacacacacaccgtagtcacttcccacccccacacggtgctcccggccaacccaggatcctctgccccaggtgacatcagttccctgtgcgccacatggcacagttatccccttactcacaagggcaggcagaagtgccttccgcggtgttctggggcccaaaagcttatgcactttggggacaccatgttgaggaaaatgatactaacctattacaagtctaaagcaagctccaggccttggagaggtcatccaagtgtcggccctggagctgacgcttcctcaatcatagggtgaaccgtcccagggtagctgggcctggacccgtctcatcaattacaaactctcccgagccagtgaccctgggcctcctcgagttacagagcaaacggtgccgctcaggcctgtctcggccccccatccaccgctgcccgggaatgtgctattgcacacaggcctccccagtgttctccagcagtgttgtgggccagcactaaggtcagcaggccatggtcaccaatgacctgtcataggcatcaagccaaatcctactggactctgtagggaagaaacaacgtatacttcatagatacttaccaagatagcctcccggattttgaaccaagtgggaaaagttaacaaccaaaaaaacataactatatataaaccctcccgggcaatgttggcccaccattgccaaccctcagaaacccacccagtgggggacacgctggccacatggtcagagaattacgaactacctagaaatgaccactcctgttgcacaataatgcaacaccagaaggcaaacagcagcagcctgtcttcagtttccacactgtattcatcacgaattttctgtattgatttttgttttttaaaaatatggcattaaatgttacttatcctaattactggatttctgatacccccatttgagtgcctcacttgcctcaccctaaatctagaactgcccatcagccaagaaagtgctgggagccccactgcctcacagaggcgccagcagcttccacgcaattctgccaccagacttctggtaggcaaacactgatctcccgctcgggggggccaaatgtcaatacccgcagcagggcttatcgcatcgccccggtacaaaggcctcctctgacgcatccccccagcagaaagaacgttcaggtgtttgataccatggttgggaacgttcccacaggtagcaggaagacgaataccgccgcttcagtcaatctcatacgacggcccccaaatcccaaaaaggcttagtatgaaatgcccatcctagtccgtgagtgtggcatgtccgcagtttgttccttcagatgtttcctacgtttcttccttccggtgggttcttggccttgctcacttcagcagtgaagccgcagacttttgcagcaagtgttacagctcttaaaggtggcgcatccagagttgctcgtctttccaggtgtgttcgtgggcttgctgacttcaggagtgaagccacataccgtacagtcagtgttacagctcttaaaggtggtgccaacccagacactttctgcttgcagcaataacatttattgccaagggagaaagaacaaaaagaagaaagcttccacaaccaataaggagacccgagcggattgccagggctggcgctggtgaccagcttttattcccttatttggccccacccacatcctgctgattggtccattttacagagagcagattagtccattttaaagagtgctgattggtccgtttttacagcgtgctgattggtgcgttacaaacctttagctagacacagagtgctgattggtgcatttacaatcctttagctagacagaaaagttccccaagtccccacccgacccagaagcccagtcggctgcacctctcacaaggactagagtgaagcgcagatagctgcatttcttaaaaagttgttttaattgtggtaaaatacacataacataaaatttaccatcttaccagtttttaaatgtacagattgtgttaagtacattcacattgttgtgcgaccaatccccagaactcttttcatcttagaaaatggaaaaactacccattcctccctcccaccagctcctggcggccaccattccatttcctgtctctatcagtttgactgctcttggtaccgcacatcacacagcaattgtccttttgtgactgacttatttcacttatcgccatgtcctcaaagtccatccctgttgtggtatgttctgaatgcccttcctgctgaatcatatttcattgtgtggatagatcacattttgtttatccactcatctgtcgatgaaaacctggcttactcctacctcttggctattgtgaataatgctgctatgaacacaagtgtaaaagtccctattgaggccgggcatggtggctcactcctgcaatcccagcactttgggaggctgaggcaggcagatcatgaggtcaggagattgagaccatcctggctaacatggtgaaaccccgtctctactaaaaatacacaaaaaaattagcggggcgtggtgatgggggcctgtagtcctagctacaggactacatggaggctgaggcaggagaatggcgtgaacccgggaggcggagcttgctgtgagccaagattgcaccactgcactccagcctggggcacagagcaagactccgtctcaaaaaaaaaaaaaaaaaaaaaaaaaaaaaaatccctattgagacctgcttaactgctggatcataggataatcctgtgtttcattttcgaggaactgccatactggtttccacagtggctgtactcttttacattcctgccagcaatgaacaagttttccgatttctccacatcctcaccagcacttgttatttcctgttttttcagagtatccatcctaatgggcatgagatagtatctcattgtggttttaatttttagttccctagttaagatgagtgatgttgagtatcttttcatgtttgttggccattcatacatcttccttggagaaatgtgtaaagtccttttttaaatcagtttgttcatttgtttgctgttattgggttgtaaggtattgtaaatattaatatattttaaatattaattgcttatcagatatatgatttgcaaatatttctccacattgcataggttgtcagatatatacacttttaacaacctcccttagaccaggggagaaatgctttgaagaacctggcacaggatctgtgggcccctttctagaagcaagtttctgggccaggttccacctaggagcagggcccaaggggaggagacagggaggagtgctggctccactcagaccctggagcccctgctgggagaggtggggatgctgacctaggcacccacaggcacccagaagccagggcctcccccatttacagggcacatcatgtccctggtcaccacccctcgaaagagcatgatgccaaaaagcccgggctgtgcctgggtcccctctgcgatggggcagggggctgcacacatctgcaaggcgcagcttgtgttagaagcacctgcctggcttatctccatgtgactctgtaaatggggagcagtggagtctgataccagcaggtgctccaggcatccagtctgatgcctcgcaggagctccctgctctgctagctccacctgaggggctagaggccaaccttgccgctccccctctcctcccgtcccttcctcccagcctggtctgatgccccatggttctccccacagcccccaggtgttccccagtggtcccacccttttcttcaggtccagcagatgccttagctggagttatctgcttatgacagcccttgtttatgaccactgtgaaggtagttctctgaagggtgagagaattagataatccaacacccagcccagttttcctttgcttttctcctcggaacggtcagagatcagtgatcgtacaagttagtcccacaggtcttccttccaggacatcctacacccatcagtctgggcctggggtctttctctaagcgtgaggcctgtggctgcgggtccagggtatcttttctgccagtggtaaaaaatgagaagcaaatatcaaaagattcaaaagcctgaccctggctgctgtctgtgtccagccaggataattcggggtctgcattgcagctcttctgtttttgtttggttttgttctcctaattgactatttgcactaaccaggtcagggctaactagtaacaccctacattctgcacaaaaaatcagcaaccccatgacctgtgatgagggtggcctggcaggaggcaaaagcgacaagcgttcctggtatctgaccagcaccaccttgaattaggacatcaacacatgcgattggactataaatcatgtaatgacaactgcaatgacaactctaaaaacaattgggcgtgtgctcacattttcacagtaaagccccgacaatgttgacaaaatccactgtttgaattctgatacgactttcttccattttgtgatctttttattgctcttaattacaacggttagcattagagacataccctatgattccattatttgcaattgcagcttaaatatgcatatgtcctaaatgatggaatgataaccagcagtgccattggaaaatgaaaatattagtgatgctgcagaaatgccaaggatgtaaccatgaggctggactcttggaactggccatagctggggagaccttggactgaggcaccctggtattggctgggtgaccctgggcacattctcctttttctcttttttaaaataagctatgttggtctttagaaaattaaaaacacaacacggacaatgaagaaattaaagaaaaagtctgtatcccctcccacaaacacaaaatgaacaagttaatgaatttgcttccttttttcctagccatattttgtattcactttaaaaagaaaaaatgttggctgggcacggcagctcatacctgtaatcccagcactttgggaggctgaggcaggtggatcacctgaggtcaggagttcgagaccagcctggtcaacatggtgaaacacccatctctactaaaaaataccaaaaaaaaaaaaaaaaaattagccaggcgtggtggcgggcgcctgtagttccagctatgcaggaggctgaggcggggaatcacttgaacccaggaggtggagtttgcagtgagccaagatcgcgccactgcactccagcctaggcgacagagtgagactctgtctcaaaaaaaaaaaaaaagaaaagaaaaaagaaagaaagagagaaaaaatgtcttactgatagcactattcacaatagccaaaagtggaaacaacccaaattcatcaactgatgaattcatgtaatggaatattacagaggcatagaaaagagtaaagtcctgatctgcgctacctggatgacccttgaaaacatgacgccgagcaaaaggagccagacacaaaaggccacacgttgaatgattccattcatatagagtgcccagaataggcaaatccatagagacagaaagtggatttgtggttgccaggagctgggcagggtcagggaggaatgaggagtgactgctaatgggtaccggctttttttaggagtgatcaaagtgctctggaattaggtagtggtgatggtttcacagtcttggaactatatgtaaaacactgaactgcagactttaataggtgaattttagggtatgtggattatatctcgatttttaaaaaagaaagtacaaagaaaaatatcactgtctttaaagatccagctctgtttcctggactctagtctagaggaggatctctcagtgtccccagaggagagcccctgggagagaagaaggctagaaacccggaggaaagggaaccctggcccaggagaggggtcggctgtgacgacctccagcatttcctgcaagccagccctgtcaccttcctgcggatagtgatgatgaagcagaggacaataggtttcaaaggtcttccaagcatggtgtcactaggctctcacaccagcctgtggggcagatgtgaggggtatcattgtcctcattttgcaggtgacgttccacaagatgggactgaggtgaccctcagctgggccctcctacctgtgctctctgcagctaggggcaggaggctgcatctgacctgagagtatccctgagaagccagagcaggactctcagctgaaccacccagaaatggccagttggacccaggccaggacctccagtggcagtggagcgagggggtgggagggtggagcaggaaggagtggttgtggcttttaatcctttctgcatataaggctgggcggcttgtgctttggctggcaggcttgtttgattctcctgcatggagagtttcaggcatgcaggtgccaccccaggtggggcccacaggtgcccctaggagccgggcaaaggcaggtcccagggagctgtcagggcacatgtgggaacccgccgccacctgcagctgtgccaggacaccagccagcgttcccacatcctgagggctttcaagagaagccataagtataatctccctcttggttaataatggcagctaaatgtagttttcacaaaaggttccaaccaagcccatatgtgggccacatgtagctgtgggaatgagagtttgagtcgtctgctctaaatatatacacaaaacaagcagtttcttctggataaactggtccacacatcattcatttcattgcggggtttgcttgttaattttggcccaagacatagggctttgagtaaacagagcctcgcccggcagtacaccagctcttacattcagaagccacttccccgagccatgtcctcccagaccaaagtcacactgtgtctttgcagccttcctccttgtctccgtccagccttctcaaggtatccccctgcaccttcctgtacccctccttgtgggtcgcccccacctgtgtgtgtaaacaccttctagaaggtcacattgttaaagccccccatgacccttcattccactccagctcccaccatttctgggctccccttcaggggaagacttctcctcggggttgacacttgctgtctacacttcctcggccccctcactctaaaactacgtaaatgcccagagaataacatgacaacgtgcacctgagcaacccccacccagatggtacaaaggtttccttggccatgtttgtagcagatatttctttctttaaaaaataaataagtacagagctggcagaacatttcccattgcccttcagcccactcctcttggactttcttcccgcagcctccccgtggcccttcatggacacatggtcctggctacagatgaaaaatcgctgggtcctcagcagggcagtcatatttgataatgaccaggattgcatttaaatctagtacctcccagatactgtacagataagatcccagctaaggctcaaaaccactcaaagccatttccatttcagagatgagaaaatcacagctcagaggggttgggggcgtggtggcagtgccagcagtccgcctccagtatgacctccactgtcccttcactcagccggggtagacagacttcccagctgggacaagcactcttaaaatctcagtgggatttccatctccagtgccagtgctcctatcatccggcacagaggcattcaaaataaccatttctgatggactggaatattttgcacaagtgggcagtatctcacctaatgggggtggggaggttatgaagggtttgtgaacaaaccacaggaagccctgctttctcctttcacaaggacaggtggcacctgcagggtctcccctgcagtggcgttatcgttgcactgaaacttgcatgaccaatctgtaaggagtcagggtgggttcagccatttgttatgaccttggcattgttcagccccagagcctggcaggaggggaaggaggaaagtttgactgaggggcctccacccattgcctttcacctgcacactgcctctgagcagattcaggagaccaagctcctccccaggtgagccatgcctctcctggggtgacctggcttacttcatgtgtgccctgctggcaaatgctctgctgctgtaggtggcattagcaagggctgagcaggtggcactgctccaccgggaggttgagtaaatcactgagtcattaggagatgttgagctctcgccaggccctcctggaggcacaggggatacagcagagaactgaagggggctgctgcctctgtggctttggtgcgaggttggggaggaggggacaggcaggaggtgggggagaaggtttatggagaacagagcgcaggggttggggtagatggggagtcagggagccctggtgaagaggccacattagagcagagactggaacaaagggagggcaggatttgttcatcttgcttcccaagaaagaggctgcaggcaaagtgactcttactcctcttgtttatcctcgtaggttctagaagatttctgaggactcagcagtaacttgcagtgctggactgaggctatttccttatatcaactttttgaaaactcatggttaatacctaagtaaagcacttccaccttccccccctccccccctgagaaagtacgttagtcacatgctagcgtttttattaggaaaagacggatttccagtgaagcagagggaagtggattgagcctggctcgggccatggcgccagttgcacttgccctggtgccgagccacagcaagggctggcactcggcaccatgaaaagccctccttttcggaatctgggggacaaaatgcaagaccgatgccccagagtcatcacagatgaccttcattggcacgataaggggggggacagggggccctgccttgaaggaggcatctaaacaccccttgtgatggaacagacttagccacaaaagccagcgaggggcacgttgttgctccctcatccgccggtggcattaagtcctgtagggcaggctgcgtttccccctttcacgatgaggggcctgagcctaagcgctcggagcctgggctttagtttctgattccccacgctgtgctggcacaggtttcctggacagcgccccagcgcgggtttcttatcctagggcggtgagaggggctgccagggaaagtgtgggaaaggacgaggggcgggactatgagagggagcggggctgggggcggggcctggaggaccgggctgagagggcgggaccgtgagaggtaacagggggcggggtgagggggcggggtcgaggacgatgggggcggacttgggggcggggcctgggggctagggaaggacagtgccagatcttgtgtccagcctctggaatcttccctcagttcttccttgtcttttcgtggccttgacgtttttgaggaacgcaggtgggttatttcgtaggatggccctcagttcgggctgtctgatgatccttcctccagatcaggttcagatgatgtactttgggcacttttgttcctcttggtgcgttttatccagagcctcataataaatatttgttccatgacaggcgatgtgcactttgttttaggtggttctccccagaattctccactgtcaagttactaatttctcctttgtaattaataagtatccatgggaaatactttgagattatgtaaatacgttgttactcttcagacttttacccactacttttagcattcatcagagattcttgatggttgccaaatggtgattgtcggattccatcattccttccacatttaatagggactttccactggaagaaagagctttctccctcccctgtgcgtttatttacatatgtatttatatcagtgtggacccatgggtctttatttaagtctaaaggttataattcttcattgtagtcatttattttcatgctgaagggaccccagagaaagccactgggagccccttcaagcagccactgtgttcttttggcatgttcccatgtcaaaagtaaagtttctcacttgctggtacagtaaggtgttccaggctcttcttatacttccccgccccagccctggattccttttagtggagaatggtatttggaaaccagtattggagcatgagtatgctcattgctattgaagtgttattgtgaagcccattaagggagccagggaatgtatgagtgtgtaagcatacaggcatgcatgcatatgtgcatatgtatgtaggcatatggccccaaggtccctgcctgctgatatgcatgctttgtgtaaccccctcccttgagtgtgggatggactgagtgactcaatgctaatgaatgggctacggcaaaagccatgggctgtcactttggacaccaggttataaagagacctggcttctgttttgcatgcactcttttgcttgcgcactcagagggtggtcagctgccccttcgtgagctgccctggagagcggtttccctggcaaggagttaagggaggcctgggccaacaaccacatgagtgagcctggaaacggatccttccaggtttccttccttcccttaagaccacagcccccacccatagctcagtcaaatccttgtgagaaaccagagtcagaagcacccagctaagccacattcaactcctggtccatagaaactgggagataataattgtttgttattctaagccactaagttttggggcaatttgttttgttactccatagttaattaatgcaatatgttatatctctatatatgtgtatatgtatagacagggaccacacatacatttatatctgtttttatacctgtctctatatattacaaaccatgagttcacactgataactttaattttagctcagtgctacaaggttcattgtgaccttccccactttccatatttgtaactcctttctccagcagtgagaaacccagctccaatcatctgcaatgtattaatttatttgttcagtcctagaggacacaaaaacagcttcagaattgctatcctatgttccagaaaaagtaacctactcatgggagttcaatctttgtttagagttcttgtctttagttgtcatatagtccaaatactgcaacccctatgttataaaaaacaagggcttcccagcttctctgggaagtaaggcatgagatgcaaaggggaaaagcacagtttctttccaggcagcaggtgctgggcttcgctgtcttgcgctggagaagtgcgaaacagacgggaaaagtgcaaaacagaagggcagggcggggcttcagaggctcccgctccatgctttctttctcccctgagcccacactgcctgcctcccttgcattagcacaaaagcaccaacctctgaggccagcgatgttgtttttaaacagtcattaaattatttacagagaaaagtgtacggtgttgctttttgaaggctactgaggaaggtttgaattttcatcatttctattattcaaaaagccaagtaacaagccgacttggatcttcccagaaaggctgagtttggggggtacttgcacgccctagtccgcacagctgggactagggctggggctctcctagagtaacaaatggggcatcggcatgacctctctgcggagggcctctctgacatgcagttgtcactgcagacctctgcagaggtgacctccccagagacaagggacctcccagagcagcactgctgcttaggtaaatggggacagccaggaggccagctccaagcctcaccccgcagatacctcagtcccatcctggtcacaggcacatggggcactcctcatggcagttgtgggaaagtggccaaggacacaaggctcccgccggccatggtttctctaagatctgactcaggattgtcacatgctaagcgttctacttccccatgcctgcaagcaccccacaagctccccacagacatacacactacacaggtcatagtcatgcacacgccacactacacaggtcatagtcatgcacacaacacactacactgcacacataccacacacataacaccacacacacatcacaaacacacaccacacatgcgtgcgcacacacccactcacatacagactcatcacacacacacacatgcatcacgacacactctgcactcgtacaacacacatccatcagacacatacacaaacatagcacacacacacacacatcatacatccacaaatagcacaaatacgcactgagccaggcctcatggagatccagcgaagggtgctggctctctccctgcctcccacgagcccttccagggatccccgaggcccctgccccacagcctgcctgcacctccctcccacctgcaggaagggctctccccagctctctctgccaactgactccacaaaccctgggaagcagacccaatggggcccttcagatgcaggccggttcacttcccagtgcccagcctctgtgtgagatgtccctggtgacagaacaagaggccatgtgggataaagccagcagaaatcgctgagcatccagcaccagcagggcctccacaggggatttccctcccacctccttctgctccaggtggcctccctgagccacacccctaacgtgccatttccagatggtaaacaacacttgcactgcagtttatctccttggaaatccccacagctcccaccccagaaccgtgcacaaaaaatatcttcaacaggtggatatggatgaattaaggtgcaaaatgagaaccattaaatacatacttgcaagccatttctcttaaaaggtactagagctaagatccttaaagacttgcatccaccattattgcagatgactattcagatgttgtgggcagacatattgttttataaaggtataagaatggactctgatgatggcttgggaatgtattggtccaatatccacttctctctctcttccagggtcagaaatcttggatagagaaaaccttttgcaaacgggaatgtatctttgtaattcctagcatgaaagactctaacaggtaaattgaaatccacgattaagacattatccaaaccagtgcttgtctgccactattctcatgtttgtaagaggcagaaagaggagtccagaagggtggccagaatccattccccatgggagtcactaacaagggagtcactggggctccttgttactccattaacatgcaaatggcttcagaaaagagtttgtgtccaccacccaccctaatgcgaactctcatagccaactgggcccacatcattcctcttagtctcagcaagatcaaggagttgagggctttcaacaggtttccaggatattttccaggcctcttcaatagagtttcataatgtatttagatgaaaaggaatttccatcacaggaaagatctgagcggttgaatgaactagctataactttattaaaggatttggcttgtacacaaaacatccaacaattttattcacctacattaaaatgcatctgttataagctgaacagaggccttgtaaagtcatgtaagtagagattaatttaactaaaatgtctcatctctaagggcaaaagctatgaggctgagtctgggggaaggggaacaatttatccatacattcgtccaatatgaaattcatgcaggtagaataatgacacagaagtacacactcttcaagatcacctgcttcaaatttgtttcacacatgcaatcacagtccctccacatccccaagctgccccttgccccacaccaccctgcagattctcctccctgcttaaaccccagtgattgccccccgaggtaagaaatgccattatgaaacaatgccaacggtcacaaaagtctcccctttgttgcatctacatgtcccttcttatttcaatggcacataggccatcctgggaactctctgtgccagcactgcagtcctccatgaagccagatgcccaggcaatagagggcaaaaagtgcttctgggctcacatacaagcctccttgatgcactccatgcagtccccagcatggattaaaaaaaaaaaaaaactagaatgaaaaaaccaaccgtttaaacccttggaaatgatcccaaagacaaacagcaagtaaaggaatatctttagagaaagccagcaaaaattcagtaagaaaggctagagtctgtgggatttgaaccaagagtttcctccctccctctgcccagctcagcaagatagagactctactccagagtgctgcagccaagaacacagagctccctctccaccagctcccagtcagggggctttcttcctgggaggagcaggatttcagcatttctcatcctgtcccttaccacctgttgctgaggctaagtcctgaatgaatgcagttgagagatagaggctcccttcttccacccgtgccccactcatgtaagcagcaaccacagaaagtgagagtggttataatggattcagacaaaacatactttaaagcaagaaaatgtaactagagatattaagaacattttataatgataaatgggacaatcgatcaggaagttacaacaaatataaacatatatgtacctaaaacagcaccaaaatgcatgaagcaaaactgacataaacaaagggagaagtagacaattcaacatgacagttggagacttcaataccccactttcaataatgcatagatcacctaaacagaagaccaacaagggaatagaaagcttgaacaacatcataaaccaattaggcttaacagataactatagagcacaccacccagtaacaatagaaaacacattcttctcaagtgcatatggaacattctccagcatagaccatgtgttagtccattaaaaagcctcaaaatatctaaaaggatagaaataatacaaactgtcctccaaccacaatgtaataaaattagaaataagaaaccaataggaggaaaaaaattggaaactcataaatatgtgaaaattaatacactaccagataaccactaggttaaagaaaatgtcagaaggttaattagaaaatacttttaggtaaatggaaatgaagacataacaaaccaaaacttaggggatgcaggtaaagtagtacggacagggaaatttatacctgtaaatacctatattaagaaagatatttaataagtaacataactttctaccttaagacactggaaaaagaagagtaaactaaacctaaagcaagtagagggaaggagataatgattaaagtggaattaatggaaaagagaatagaaaagtagagaaattcaatgaaattaaaagctcttctttaaaaacctcaacaaaattcacatatctttagctagagtcataaaagaagagaaagataagactcaaatgactagactcagaaatgaaagaggggacattactaccaaccttatagaaatgagtatgaaagaatactatgacttatatgcaaacaaattagataacttagatgaaatgggaaaattctgagaaatatacaatctgccaaaactgactcaagaaaaaatgtacaatctgaacagatctataaggagtaaagagataggattagtaataaaaaaactgtccaaagaaaagcccaggcccacatggctttttcgatgaattctaaaaaacatttaaggaagagttaataccaattcttcacaaactcttcaagaaaatagcagagaagggaacatttcccaactcatttaatgaggccagtactacccagataccaaactagacaaagatatcacaagatagaaaactatagatcaatatctattatgaacatgggtgcagaaattctgaacaaaatactatcaaaccaaatccagcaacatataaaaataatgatacaccatgaccaagcagggtttatcccaggaatgtaaagttggtttacattagaaaaataaataatgtaatatagcatatcaatatagtagaaacaaaaatcacatgatcttttcaataggcacagcaaaagacttggataaaactcaacactctttataaaaaatcactcggaaaaccaggaatagaagggaacttcctcaacccgataaagaacagctataaagaatccacagttaacatcagacttaatggtgaaagattgctttcctcctaagattaggaacaagataaggatgtcctctctcgctacttctattcaacattttaatggaagtacaggccaaagcaattaggtaagagaaataaagaaagaaaaaatattgagattggaaagagagaagtaaaactctctatttgcagatgacataatcttatacatagaaaaatcctaaggaatccaccaaaaaatattagaactaataaatgagttcagcaagattgtggcatataagatcaatacacaaaaatcaaatgtatttctatacacttgcaatgaactatatggaaatgaaactggcaacataatttatctataattgcatcaaaaagaataataggaggactcacattttctgatttcaaaacttaatacaaagctacagtaataaaaggacaacgatactggcataggatagacatatagacaaatggaacagaattgacagtccagaaataaacccatacacctatggcaaattgatttttggcaagggtgaaaagtactttcaatggcgaaatagtagtcgtctcttcagcaaatggtactggaataactggatagccacatgcaaaagaatagtcttggacccttacctcatgctatctataaaagttaaaatggaccaaacacctaaatgtcaaagctaaaactataaaactcttagaagaaaatgtaagggtaaatcatgacctgggatttggcaaatgattctgagatattacaccaaaaacatggacaacaaaaacaacaaaaaaattgtctttaccaaaattaaacactgtgcttcaagggacgctatcaagaaagtggaaagacaacccacagaatgggagaaaatatttgtgaattatgtctctgataagggacttgtatccagaatacggaaagagatccaataattaaaaaaaaataaataacccaagttttttaaatgggcaaaggaaatgaatagacatctttccaaagaagatacacaaatagtcaataagcacatgaaaaatgctcaatgtccttattcttcagggaaatgcaaatcaaaaccatgatgataaactgcttcacactcagaaggaagactagaatgaaaatgtaagatagtgtgtgggagaggatatggagaaatcagaaccctcagacactgctggtggaaatgtaccatgatacagccaccttggagaacagtttggtggttcttcagaagattaaacatagagtaaccgtatgacccagcaatcccatgcctagtgtatacccaagaaaaatgaaaacattcatccactcaaaaacttgttacataaatattcatagcagcattattcataacagctgaagagtgcgaatagcccaaatgtccattaaatgataaatagataaacaaaatgttcatccattcatacgagaatattattaagccataaaagggagtgaagtaccaacacatgctacaatatggatgaaccttgaaaacatgctaagaagctgatctccaaagaccagatattacaggactgcattcatatgaagtgtctagaacatggaaatccacagagataaaaagtagacttgaggttgcttatggcttggggagtggtgcacaggtagatagatggtggtgagaaggaagataacttaaaatatgccatgccaagtttctttttgaggtgatgaaaatgttcgaaaattaactgtgatgatggttgcacatatctgtcaatactaaaaaccatttaatctctctctctctctctctctctctctctctctatatatatatatatatatatatatatatatatatatatgttttttttttttttttgagacggagtctcactctgtcaaccacgctggagtgcagtgccacgatcccggctcattgcaacctctgcctccggggttcaaacgattctcctgcctcagcctcccaagtagctggaattacagacgtgtgccaccacactcagctaatttttgtgtttatggtggagacggggtttcacaatattgaccaggctggtctcggactcctgacctcaagtgatccacatgccacggcctctcaaagtgttgggattacaggcgtgagccactgctcctggcctgaatcacatacttgaaatgggttgattatgtattacatgaattatatctcaataaaaggaaaaaagagagagagaaagagggagggagtgagggagggaagatggaaggccatcagaaggagggtgggagggagagaatggggaagcgaggagggaaaagaaaaaggaaaacaaaaggaaagacaaggcagggaggaagccccaaggctggccccatgggagcacagaaagccttctggcaagggccctgcacatgtgcattacacacgtgcacgcattcgcacatctagcccagtaaagacatcctctctagtcctcaagccaactccatccccagctctcccaccccatttgctagggtgcacggctgcccacacaggctcctgctgggtccaggaacagacctccctccatgccttccctggattccatctccaccaaggcatcactccaggctactgcagttcttcctaacaaacttttcaagtttttggtgggtccagtccactcaaaacagtggcagccaaaaatgatggagtaacagatgaaatcctaggcacactaggaaaagaagctggcacaaagccagggaacatgttcagagaagactagaaagccagagttcagggagggcgtgagaggttggctgggttttgggagagatgctgtagagctagaagatccctgatgctggggcgggttatggcccaatgggccatctgtccaaggcagaaaaagacatattggtcacttttgaaatagccttttagcattacttgagtggagaaatgttttactaaggaacagaacaattcaacaatatggaaaaatttggctgacacctaagtaagtaattttagaactttgggaggccaaggcaggcggattgcttgagcccaggagttcgagaccagcctgggtaacatggcaaaatgctgtctctactaaaaatataaaaactagctgagcatggtagtgtgtgcctgtggtcccagttactagggaggctgaggtgagaggatcacctgagcttgggggaggtctgggctgcagtgagctatgatagcgccactacactccaacctgaatgacaagagaaagaaaaatctggaaggtcaactctatgttcggagggcatgtctatactttgtcacagaatgtttagtacttgatgtttatactgatgttatcaagacatcaaaaagttgaaatattttccgaaagagcaaccatccaatgtgtctaaaatcgactggcatataaagagatgtgcactgattatctggaaaaggccatcagatggggcatttctgtccctaataacgctggcttactgaagtgttagtaggctcctgtttgggcccaactcacctgttgaggttaattcatttttgctaatgaaggggaaagggggagattgttgtagaaagaccctgctttgcctttgttttcaggtgttgctgtggccagttcaccaaccagcatatcccccctctgccaagtgcaacacccagcaaaaatgaagaggaaagcaaacaggtggagactcagcctgagaaatggtctgttgccaagcacacccagagctacccaacagattcctatggagttcttgaattccagggtggcggatattccaataaagccatggtgagaaaggcattcagacatggtgccactaggatcacagctttcattggcggccagtctcccagccccaaactgcagatacctggtcttcttcatggctgtggctcaatcttcctagatatttcattgaaaaaccaagagatatatctgtgcacatggcttttagccatgaggcttggaaactggacaccactgtaaagaacatctagtgtcccgtaaatccataccaaagctctgaatccacaaaccaggctctggcccaaccctgcaaacacactccattgctccatcttcagtaaaggaagacaaattcatttttctaataactgtggacctgcagcccccttagatgtgttgagagtctttggaaatattttcctctgaggtctgtccacagcttccctgggcctgcgctcagctggcccgagaaggaccaaggtccctcacatttgcatgtaaacagggagtgccctctgcccttccagtgagccctgccagcgtgggggaggcttcagctctgtgatccgttccagctcactctgaattacactcctacatgcccagtcacagactttttgcaatttcattttatttcactggcccaacatcattgttaaaataaaatttagctgtgttccaaatgctgcaatatacagtcttctgaaatggcaccctacatattagcccagacacaaagaagcagtttataggagacaaggcatctgagcattattagcctcctcctcactttgaagaggtcaagttcatgggtgggcccatgatcgcctgacccatttactcaacaacatcctcatccaacttcttgggccactgttctagctaagccagctttggaacctattcctccaacattaggattgccagataaaatacaggacacccagttatatttgaacttcagacatacattggataaattttcagtacaagtatgtcccaaatattgcatgatttattgcatttaataaaaatgttgtactgaaacatttttcattgttcctctaaaattcaaatttaactgggtgtcttggtctgtttggctgctataacaaattgccttaggctggggaatttataaacaacagaaatttattgctcacatttctagagtctgggaggcccaagatcaaggtgccagcagatttggtgcctggcgagggcccatcctctgcttcatagatagcaccttcttgctgtgtcctcacatggcagaagcagagaacaagctctctgagtcctctttttttttttttttttttttttttgagttggagtttcgatcttgttgcccaggctggaatgcaatggctcaatcttggctcactgcaacctccgcctcccaggttcaagtgatcctcctgcctcagcttctgaagtagctgagattacaggtatgcgctaccacacctggctaattttgtattttttttagtagagacggggtttcaacatgttggtcaggctggtctcgaactcctgacctcaagtgatccacctgcctcggcttcccaaagtgctgggattacaggcatgagccaccacgcccagccctgagtcctcttttataaggacactagtcccactcacgagggatccatgctcatgacgtaatcaccttctaacatcccacctcttaacactattgcattgggaatcaggtttccacgtgaattttaggggaatacaaacattcagaccatggtaccaggcatcttttatttgtatttgctaaacctgacaatcctctccaaagttcccttcagtcacttggccacagactcacacagagggctccagggccctgaggaagagacaagccaggcagttcttgcttggacatgagcaatagcctcactcccctttgacacgagaagcaaaaccaagaacagaggctgagtgccacacactctttcacagtatatccgtgtatcctatgacaccaagccagactcactgctccatctcatggtgaaagattggcagctggaactccccaagctcttaatatctgtgcatggaggcctccagaactttgagatgcagcccaagctgaaacaagtctttgggaaaggcctgatcaaggctgctatgaccaccggggcctggatcttcaccgggggtgtcagcacaggtaagagcaggccctttccctcccgataatcaatgtaccacccagaactcactgtggtccccaaagagcttcctaataactaaggacaacaaaacatattgcatcctgatcctatttatgactaaagtgaagtctttattccctagcttgtgttttttactttgatatgactcttaaaaaaaaacagcaaatatagtaatgattgtcataatggtcaacatctctgggtcacccatgacatgcaatattccttgaactgagccctgtacaagcatcatcttcattagacctctcgacaatccttttcctgttataggacaggaaactgaggcacaaagacattaaggaacataccaggcagtatggctctcaattttcactgaaggcagccaaggaatgccaaaaagactccagttatttccagctttaggccttagacatctgtaaaggaaatccctacacagttgctttggtttctgtttttgttttcccgtttctagagttaatgcaagattgctcgttatcatgagctcagactttcagtgtactttgttttaatgataaagatgagtgtgtctcacccctgatctgtagggaatgtagggactcagggcaagtgtccctaaatttcatgaatgatggtgtgctgggaagtaaaagagcctaaaatatgaccaatggctgctcacaggtgttatcagccacgtaggggatgccttgaaagaccactcctccaagtccagaggccgggtttgtgctataggaattgctccatggggcatcgtggagaataaggaagacctggttggaaaggatgtaagtgttttctctgcaaatgttggcagttttttaaaattaatgattgattttgaggtaaccgttgattcagatgcagttgtaagaataataagagagctcccttgcagcctttcccattcctccaatggtaacatcttgcaaaaccataatgcaagatcacaacccggatactgtcattgataaggtcaaggtgcagaatgtttccatcaacacgaggatccctcctgttgccctttcatatacatatacctcactccttcctacccccacctcttccttaacccctggaaacaactaatctgcaccaccccgcatttcaagaaggttctgtaaatggaatcatacagtaatgtaacctttggggattggcttttttttcactccacatagttctctgaacacgcgtccaggttgccatatgtattggtcttcattcctttttactgctggctgacatcccatgatatggaggcaccagtttctttaaccatttgtctgttgaggaacagtttggctgttacaagtaaagtagccataaacattccagtgcaggatttgaggttaacataggttttcatttctctgtgataaatgccaggggtgcaattgctaggttgtcattatctaaaacaattaactttctttctattttaatgtaacaattggcaaaaataaaaccttcaaaaggcagggtagagatgtgagaataagttttagtgcagtcactccacacatatgtattgtgcttgcttcccttgttggtcttaacatccaagtcctgcaggtctgatttgcgctgtgcactttgtcaggtaacaagagtgtaccagaccatgtccaaccctctaagtaagctctctgtgctcaacaactcccacacccacttcatcctggctgacaatggcaccctgggcaagtatggcgccgaggtgaagctgcgaaggctgctggaaaagcacatctccctgcagaagatcaacacaagtaagtgctggcaaaggcacgcagtcctcctgggctgatgccatcacagtggaaacaaggctgagaaggagattgattgcccaaggggattagaagattaaccttgcttcttgttaggtcaacagaaaatgactcacctagatgtcttaccttagccacctaccaaatcacattcactgggctacatggggatgctttgccccaggttcacaagttagcacgaaataaccctcagtgctcgccatggtgatggccttgcccaccctgttgcccagtggttcttgttccctgtaattagttgttattttttaagtgttttaacaggaaaacaatttctcaaagatttagtaggattctttctatttgctgataagtattatgtgattattaaatatctctgtaatgctgggcctttcatgtagactaagatggccaggtggggacatatctggagagggctgcaggagccatctgctcctgaaggggcatcatccttgctggtcctgagggggagctgtcactgtcagacgaaagctgaggtcgaactagagagaaagacgcaaacctcaaccagaagaaacaatgataacaactggttagaattacaataactggtataatctcttggagcatgtttatactccagtaattcttaacgtcaaacaattgttaaatgatctgaaagagcagtttgtttttcccattactggcaagatttttgtgggagaccatctagtcctggcgaatggtcattgggaatcatcatgtatgggactgtgatgctgcagagtgggtagaatggggatggcctactaggaaaagttgtagatttccgagaatcagatctcgaagaatacattggtcgatgactgaatgttttttgttctcacatctctaatttttctggacttgtaagtttttacaacaccccatttcacctggccatgtgacttgtgggcttccctttgtcatccttcgcctagggctctgagcagggcagggacagcaaaggggtgctcagttgtcacttcccacagcacggagcttcgaggactccagcctaagccaagaagaacctgttctactctgttgctcgaaaagaaggtgatttggccaccatattcctaaagattgaaaatatcaatccttgcttgggttggaaatctcaaaggcggagtccaggatatcttagttcatttttccaatatctcctggtcagggctttgcacaaagcagaccctcaatgcatgtctgctgaaatgaacttagctgtaattactctggtggacacagcagagttattcaacatatgtaagagtccctgactgtagaaacacctcatggaagcaaattagaaactctgaaatggctcatttgaaattctccaatcttctcttaaccaatgctggcagatttttatctgaagcccttcagagctgagaccaacgatacttccacttgcctttagttaatatcgatcaactaattcccatcacaactaatggacagctggtgaaataggctcagagtgtgatctgtcatggccagtgtggcataaaattaggaagtaggcaaatgtgcctccactcccatttccttcccattccagaatcccaacttcctggaatcttcctgccacctcttgcttcccagagccatgcctgcaggttctgccaccaaaagttagttggtacccactgtgttcttgaagagtcctattaactgatagagacagagggaggactctgggaacaggtcattaactgatgggccactagtggtccaagtggctgcgtccaagatctgcactttattccagccactgaagacagaaacgtcaacaagaacagtgtacctcatttgtatgctacttaacgtttacaaaattatttgctagccaaacacatattctgatatttttacaactgcaggagttaaaggaagcactgtgattgttcaccttttacaaatggctgtctaaggctcttggtgatttggtgattggcccagtgtcataagggagaagccaggaattgaactgcaatttccctggctggtccagatcccctttcatcatcttattcttcagggacagccatcagggtgggaatttcagaccataggctaggacagccagggggatatttttccagccaggaataccttccaatatttctcagtggtcaccttgaagtagccccaacatcaggtgggtgggttattcaggagtttaaccatatgtgagtcagaaagtttcagactttgaggtcctggttttcccaatgaggccataatatgtgacagaatgcaagaatgataactgggctgggcacagtggcttacacctgtaatcctagcactttgggaggccaaggcaggtggatcacttgagcccaggtgtttgagaccagcctgggcaacatggcaagacttcatctctaccaaaaattagccaggtgtggtggcatgtgcccatagtcccagctactcaggaggctgaggtgggaggattgcctgagctgagagggaggttgaggctgcagtgagccatgatcatgccactgcactccagcttgggggacagagtgtgattctgtctcaaaaaagaaaaaagaaaagaaaagaaaaagaaaattgttatcacatgcctgaattccttccagccagatagaacatcccccaagtcgtaatgtttttactcttccccatacttcaggagttaaaacgactgggtggacagtgcagggcacaggtggtatgggcgaatgtggtttgtgttgcaggactggggcagggcgtgcccctcgtgggtctcgtggtggaggggggccctaacgtggtgtccatcgtcttggaatacctgcaagaagagcctcccatccctgtggtgatttgtgatggcagcggacgtgcctcggacatcctgtcctttgcgcacaagtactgtgaagaaggcgggtaggatttctgacgcgcgaggaagggcgggttcgtaactccctctttgtcgggccaaggagaaaatctaaagtggtctgcttagacattccaaacgtgtttaaatcaggaagatttgctagatctcctctcccatttcctcaggtcagcatccaggggaaccatcagaggcagggtgttcctgatggaattctctctccctcatttccaacttcatttgcccttagaaagtttgcaacaaagctggaatttaggacaagtgagaatacgatgtttgactatggttactttttgtctcctgtgtcaggatatcctcccacagcaaagtctcaaatcaaagacagagatatgtctgactcattcatatatagatttaacttgccttgttttgttctcttgcattttctttgaacagaataataaatgagtccctcagggagcagcttctagttaccattcagaaaacatttaattataataaggcacaatcacatcagctgtttgcaattataatggagtgcatgaagaagaaagaactcgtaagtgtcttgaatttatttccaaacaagctctgtggagagaattatgtttccttttctaattccgcccatgtgtgcatgacagggttattcatattttagtccggccttttctgagagacagtacaaatgcataccaaattggtggctgtgtccacatgacagaagctgaacgagcccacacaggggagggcccctggtgctttcaaactttagcaagtggggcatgacaccacacaacaccctctgaggctcataatattactcagattgatagtcttggggaaaagggccacataccaccctgtcaggcatgtttacaaagttctgttattttatttcccactccttccctcttccgttccatttacaaggaataggtactcttgtcgtgcacataagatggcctcttcaaaattctaattcctacaaatatctcctgtctgattagatacgactttgcatctccgatggcgactgagatttcggagtgtagctccctcctctcgagggtgccagaagggatggggaaaataataaagtcagtatgcaggcaggcaccccacggcaatgccataacttctggaaatcagccgggcacagtggctcacacctgtaatcccagcactttggggggctgagacaggcagatcacctgaggtcaggagtttgagaccggcctggccaacatggtgaaaccccatctctactaaaaataccaaaacaattagccaggcatggtggcgtgcacctgtaatcccagccacttgggaggctgagataggagaatcgcttgaacctgggaggtggagtttgcagtgacccaagatagcgccattgcactccagcctgggcgacaagagcgaaactccatctcaaaaaaaaaacaaaaagaaaaaagaaaaagaaaagaaaaaaaagaaatcaacagcacttgctttgaaactgtttagtgctcaggatcattttattacgtgtcagtctctgtggtcattttgtaacaacaccccatatctccttcttgttttcaacttggctttaattcagtcttttcacattttcaggtcactgtgttcagaatgggttctgagggccagcaggacatcgagatggcaattttaactgccctgctgaaaggtgagctctcaggaaatggtgactcctgtccctctgatgttggcctagccggcaatccttccctcccggcctcccatggactatgtctgctggtgctagaccctgagccagccaggccacttgagcagtctcagcatgaagccacggcagaatgacaaggctcgctgtttctgtggggcagaggtctgtgggtgctcctggaccatcatgggctgaggtcagaaccgtttctatttgtaactggttcattgagggcttcagctcctagagtgtaaacatcagatgggttcctttgcaatcactgcattccgcagtgttctgtccaatttccccgtcttggttctaatgacaggcttcaggccagcgttcatggccgggcggggagggtctgctctgggatgcacacttcctccctgcctctcagttagcctggtgccatgagggggcagggaggacagagagaggggaagggtcactgtcaggctggctgcctggcagtcccagggttccagccttcctggagatcatctccagggtccctgagtcactgggttcctgttctgtccctcccaaggagaccatgcacagctggcatgggaagaggctgcctccaccttcctccagggaagctctttcagctcggagcctttgtggtcattcagggcaagagcaaagccagcaatgcttagttctaggccagcagcccaagggaagcctgtgctcaccacccagcacctgccaaaccctggcggtccaggcgtggagtgaaaaatcattccggtttcttgcctttccaggaacaaacgtatctgctccagatcagctgagcttggcactggcttggaaccgcgtggacatagcacgaagccagatctttgtctttgggccccactggccggtgaaactgttttttttcgattcatatcattgatcttgactttgtacaagtgacctattagtatgttctcccttgtgacatggaattcaggaaattatgtggggtttctgatgatatgatatgtaatctattaggctcattagaagatgtcactgtttaacttcaaagaaccaacaagaagtaattccacattcaaaccagtactcctgaagaaattaatcaccaaatattttatcgttgctgatgaaagtgggtttttacctttttaaagaaaaagaagaagaaataaaatagcttattaaaatttaatgcaatgcttccatccagggcaatgatttttcaaactatgttccatgaaaccctggaggcctagagaactctgtgtgtgtgtgtgtttatgtgtgtgtgtctatgtgtgtgtctgtatgtgtgtatagggtgtctgtgtgcatgtgatatgtggtgtgcctgtatgtggtatgattttgtgtaggtgagtaatgtgtgtggccatgggtggtatagtgtgtatgtgggtgtcattgggagggtattgtgtgtgtgtgatatgggatgagcagtgtgtgtggagtgttgaggagtactaatgtgtgtgtgtgacatggggatgagcgtgtgtgtgtgtgaacacacataagtctgcatgataaaggactccaagcctcctacttcttcttcagtcaaagcagcttctttgatccattttatagattaggagtcaggataaatttgtgtttgcaaaaagggctctgctgcttatgaaaggtagtaggaatatctagagagtttatgttggttttaaaaaccacatttcttggccagatgtggtggctcacacctgtaattccagcactttgggaggccgatttgggaggattgcttgaggccaggagttcaagaccaacctggtcaacatagtgagacaccatctctacaaaaaataaaaaaaattagccaggcatgggagtgcatgcctatagtcccagctactttggaggctgaggcaggaggattgcttgagcctaggaatctgaggttacagttagctgtgactgcaccactacactacagcctgggtgagagaatgagatcccatctctaaaacataaaacaaaaaacaatgcaaaaccatttctcaaaacatccctggcatattgctgcacaaatgcattttacttaactgcctctgtgtttaggtctcccaaagcatttaattgcctcccaaagcatttaactgcctctgtgtttaggtctcctggaagttgcttccacacattgccataacacgttttatcactctttattgattgatcatgtgtagacggatccatcaattctccacttggtaatagaaggaggtggattgctcactctgcttccactgcccctgttcctcctggatttgatagttgcctgtttaattctattttttctttttttgaaatggagtctcactctgttgcccaggctagagtgcagtggtgttatctcagctcactacagcctctgcatcccggattcaagcgattctcctgcctcagcctcccaagtagctgggactacaggcacccaccacacccagctaaattttttttgcatttttagtggacacagggtttcaccatgtcggccaggctggtctcaaactcctgacctcaagtgacccacccgccttggcctcccaaagtgctgggattacaggcatgagtcactgcacccagccctgcttaattcttatattggtcacctttatgacggtaaagagtacgtggaaccacctacttgttctgtccgcttcagactcccattttgttaaatgaggaaattcactccatactcctccttcctctcctgacaagtttcatcttcctaattcaatcagccccacttttacaaggtgcttgacatgatgaacatgtacatatccttctttaatcattgaggtcctgcttacatcttactctttaatcatcattcagtttttgtacttagtctctatgttgattctaaaaaaatggagaaaccagcagctttgacattgttgtgattacatggagattgttcactgctgaaccgcaaagtaggattgaagtcaaggagaagggaaggtagtcctgggtcatttatctggctcacacaaaggaaaatatgacaggcatcaaggtttccatcattcaccaactatttaaaattaggtgacactttaatttccttcatatttggaccatgacttatttgaatagatatttgcttttctccacatttctaattgattctctttttttcttccaaacatttgccttgatgtcattgctgtatctattcttttttttttttaagtatttttattgtatctttagtttggttccaaacaaatagatgtaaagtttggtacctgcctatgtacacttgccactgctaatgttgaggcttatactagtccgttttcacactgctataaagaatagcagtcttctgagactgtgtaatttgtaaaggaggtttaattgactcacatctccaaatggctggggagaccccaggacacttacaatcatggcggaggacaaaggagaagcaaaggcacatcttacacggcagcccatgagagagagaaaagagcacaaggggctgccaaacatttttaaaaccatcaattctcataagaactctttcactatcatgagaacagcgtgggggaaactgccctcatgatccaatcacttcacatcaggccccactcttgacacctggggattacaactggagatgagatttgggtgggacacagagccaaaccatatcaaggctcttgtcagcaacgtggatatatcaagcatggctgcagcaaaggctaccctgtggggagctagggcaaaattattgcactctttccaagatgaagccatacagatattaccttaaaaatgccattttgtacttttatttgcatatacatagtttatatttaatatatactttgtactttaagttcaggggtacaagtgcaggtttgttatgtaggtaaacttgtgtcatgggggtttgttgtacagattatttcaccacccagttattaagcctagtacctgctagttgtttttcctgaccctctccctcctcccactctcctccctccaaaaggccccagtgtctgttattcccctctatgtgtccatgtgttctcatcatttagctcccacttatgagaatatgcagcatttggttttctgtttctgccttagtttgctaaggataatggcctccatctccatccatgtccctgcgaaggacataatcttgttcttttttatggctgcagccatatctattctcttaattgttactgtcccatttcttcttgaagaatctttcaaagccccatgagttcctacccccatcttccctggatgctctcaatgcctactgtacagttgtctacatcagacatcccttcgttgcactctgagactggccattgcctcctagaccccatgtcttcctccctttcagattcctttttcattttgctggagtacatcttcaagtaacttttacataaaagcatgtgggagaattactgtctgagtctgtgttgtgtttctgtaacagaataccacagatggggtaactgataaagaaaggagatttatttcttacagttctagaaactggaaagtccaagatcaaggggctggtatcttgtcagggccttcttgctacatcatcccatggtgggaggtgaaagggtaagagagcgagagacagcgagagagggctgaactcttaaaacaaatctctcaagatcatgaaccctctccctctataaaagcattaatccattcatgagagcagaatttcataacctaaacaattttaaaggtcccatctctcagcactgttgcactggggattcagtttccaacacaagaactttgggggacactttcaaaccacagcaattatcattctgtgtctttacatgtctgaaaaaagtctgcctcacatgaggctcaagattgtcctatgattttcattcaattatagatgaaccattgttttctctctgctctttgctttttcagtgcttgaaaatttcacaaggatgtatcttctatttcaagcaaatgaaaatagaagtgtatagagaatacaaactcaagcagccatatcttcacacatgtagacatttaattcttctggctttcaaaggtccctttatgctgaagacctgaatcagctctgtgaaattttcttctatctcttctttgagtatttctttctttattatctctttcccttcatctggattttctattagtcaagcaactgctggtccccttctcccagactgaccgtccattttcggttttttatttctctatcattttgctgtatgtttttggaaatctcaactttttctttagcttttatacaatttttaaaggtttaggcactcatgctttttatatttaagaaagtgtttttgttccttaacaattttattttcttattagcctattttcatctcacagatgcaatatctaaggatatgaattagattttttgaagttatcttctgttccctagattatctctattttctccctggtcagctgttctttttgttcattttgggtttttctgttatgctgttgattttctcaaatgctctagatccttggctgtccatcacactacagaatgagggatagaactgcttaattggtatggaaacccattttgccaacaggtttttctcctccctgggaggactgcccaggaattccctgcttaggaaggagagtatcgcctgaacctcctgctttgctgagtgccgactggagagggctgatgggctctgggcctccctattctttagcagacatcctcccagtttttactgggagtgaagcccaggaatgcagttgcttgctctgcacccaccacagtggcagcctggagaccgggaggggatgtgtggcctcctgctctgtagaccatcttccggtcaccatgccttctgcccaccacatgccctcttctttgtatcttggaaaatctggtctcacctcaagagcaacctccacattacacattttgggctttggcttcctctccatagttttaactggtccttcaatgcttccagaaatttgttaaaaactctctggcccgcctcttctccctgaaatagatttttctttttcatactcctctgctgtcatttaaatagtatctggggagggagggaagacaggaaacacatgctcaggctgtaacctggagccaaaagtccttctctgtctccctacagtgggatataaggtctccaaaatcttcttttaatagttgaagcactcaagaaaggatgtgcctgtgaatctatagtctatctagaattcttcatatagtagaaaacttgtggtagggaggacataagaattccaacacagtaaatcaatcttaggtctgatttgctatatattactagacaaaattcttctatctatattttctgttattgaatgcaaaaaataaaagctgcatgagagtatgatgtggttatcagaagctaggatgtgagggattgggagattttggtttaaaagtacaaagtctcagttaagaagaataaattctggagacctattgtacaacatagtgactataattaataataatgtatagtgcacttgaaaattgctaaaagagtagattttaaatgttctcatcacaaaaatgataagtatgtgaggtgatggatatgttaattagcttcatcgttccacaatgtatacatatatttaagcatcatgtataccataaatatatacaatttgtcatttgctaattaaaataattaattaaagtaaaagctttgcaaaaaaaattcttcttaaaacatgcttttaaacataacgaagaggccaggcacagtggctcactcctgtaattccagcactttggaaggctgaggcgggtggatcacctgaggtcaggagtttgagacaagcctggccaacatggtgaaaccccgtctctactaaaaatacaaaaattacccgggtgtgatgttgcatgcctgtaatcccagctacttaggaggctgaggcaggagaattgcttgaacctgggagccggaggttgcagtgagctgagatcatgccactgcactccagcctgggtgacagaacaaaactccgtctcaaaaaacaaacaaataaacaaacaaacaaaaaacataatgaagagagagaaaaagagagacgtttgatatatacaggtaacaaaaggcaatttatttatttatattgaatcataaaaactttggactaacaatttttgaaggaaaatcatcaccaacattcatctcaagagcttttttatcttgcaaaatggacactctatgcccatcaaacaataattccccatcctgccctctcctgtgactggcaaccaccattctactttctgttgccatgaatatgactactgttagtacctcctataagtggagtcatgtaatatttgtccttttgtgactggcttatttcactcagaacaatgtctcaaggttcatccgtgttgtagcatttgtcagaatttccttccttttaaggctgaataatattccattatatggatagaccacattttgcttatccaagcatccatcagtggacacttgggttgctcccatgttttagaataatgctgctatgaatgtaggtgtacaaatacttctttgagacttgctttcagttcttttgggtatgccaagaagtgaaaccattgatcacacggtaatcctatttttaattttttgaagaatcaccaaactcctcccacagcagttgcaccattttacatttccacccacagtgcacagggttccagtttgtcctcattttcacaaacatttgtcattttctgttgtttagataatagccatcttggctgggcacagtggcttacatgcctgtaatcccagcactttgggaggccaaggcaggtggatcacctgaggtcaggaattggagaccagcctggccaacatggcgaaaccccgtctctactaaaaatacagaaaaaaaaaaaaaaatgagccgggagtggtggcacacatctgtagtcccagctactgaggaggctgaggtaggagaatcacttgaacctgggaggcggaggttgcagtgagccaacatcgtgccactgcactccagcctgggcaacaagagcaaaactccatctcaaataaaaggaaaaaaaaagataatagccatcttaatgggtgtgagataatatctcagatggttttgatttgtatttccctaatgattagtgatattgagcgtttttgtgtgtgtttattggccatttgtgtatctgctttgtagaaatgtctattcaagtctcttgcctatttttgaatcaggttgggttttcttgttgttgaattttaggagttctctatatattctggctatgaaccccttatcatatacatgatgtacaaatatattctcctattctgtggctacctttactctgttaatggtattttttgctgcacaaaacttttaaattttcataaagtccatcggatttgttattaataatttttccgtttgtgcctgtgcctttggtgtcatattcaagaattgaattcccaaatccaatatagtgatatttttgccctatgttttcttctaagcattttagtttaattaattaattagtttttgagattgagtttcactcttgtcacccaggctggagtgcaacggcacgatctcagctcactgcaacctcttcctcctgggttcaaggaattctcctgcctcagcctcctaagtagctgggattacaggcacccaccaccatgtccagctaattattgtatttttagtagagatgggattttaccatgttggccaggctggtctcaaattcctggcctcaggtgatccatctgcctcggcctcccaacgtgctgggattacagacgtgaactaccgtgcccagcagcattttatattagtagttttcgattttatgttcaggtatttgattcattttgagttaatatttgtatatggtgtaaggtaagggtccaactccagtcttttgcatgtggatatccagttttcccagcaccatttgttggatgcggtgtcactctgtcactcaggaccataacggttttatctgcatgaggagtcagccaagacactttttcatccatatttgtatgttgaccaggaactatataaatgcacacctcccctgacataagctctgcctcagccctacttaagggttttaagcaggagagttacttgcttccatttttatatttaaaggtcactctggagttactgtggaaaatgcactgggtgggtgccatggcaggtgtgcagagtcctattaataggcctttgaaataattcaggccttggactagagcagaggcaaagaagaaggcaagaatcagaattaagcaaaatttagcattaaacatggctgcacataggggtagatgaatcattgagggcactggagggactgagatgtcacaatgctccccagttctctggtttgcacaacttgcaagctgtggtaacatttccctgagataagggaccctggaagaggactgggtcggagggtaggtcctgagagtggtttgggacataaggagctgcatgtctttgagacatgcaagcaggatgctgagcaggcaacaggagctctggggagagaggtgggccgcagccagaaaggagaagttgtatgccaatcagtggtgactggtggtgtgggggtcaatgaggtcgtcaaggaagagagtagagtggaaaggtagaaggctgaggacagagcccagaggaaccttgacatttaaagctgcactgagaagtagtggccagacagggaagaggaaagctgggagcttgtgatgcccaagaagccaagggaagagactctaggaggaagcaggcagtggagtcagatgtgctgagaacccagcatgaaatgcccatgaggcaggcaccagcacagttctcagcaactaaacccacagcccaggacagatggaagaagcagcagggtgcgtgcaggagagataggaagagaggaaatggaggctcctcaggtaggcaatccaccaggagcgtttggtaagaggagcgggtgggtctggcaagagaggacgccagctggagggtccggttgtttaggtgctggctctgtgtctgcaccaggacacactcccacattctccaccagaccaggagacaaggccacggggccaggcctacttctgctgtccctcctgttctctggagtagagcacacactccccttgatgaatgagtctgtcaccgcattgcatgcatttcagtgacatgcggagagcttctttacccgccgataagctccagtttacgtttacatccaggcaggcatcctcagttctatccattgtcttgtacccccttcacaatcactttttcccatcattaaacaactatggacacatgtctttggtgcctttgaactctcctttcagcatcctttcctccatgcaaaagcacacatggatcaaaatgtcagccactttaagtatgcaaagtcgctgcatcaagtcaagtgtgtgtttgtgcacacgagtaacagtggttcccagtatcagagccttcttcagacagccaggcctgcgacgactgagtatgtaggtgtatgggatggagtccgtgtgcacctgtacatatgtgtgggcatatgtgtgcactgtgtgggtgtgcacatgtacattgtgtgcatgtgtggtgtgcatgtgtgcacatacagaggtgggagggtcaatgagctggtctggggacaagaaagagccttagtaccatttcccaactctgattgctgtggactgcagcccctgggaagcctggcacccccgacggacagcaaagccacggagaaggagaagaagccacccatggccaccaccaagggaggaagaggaaaagggaaaggcaagaagaaagggaaagtgaaagaggaagtggaggaagaaactgacccccggaagatagagctgctgaactgggtatgtggaaggtcacagagatcacgagcttggcatcacccttccccaggggaagggatggttcttgtccttgcttcagtcccacccagggccctgatcccaggagggacgggtaaaggcttgactgggtagtgtcagcatttcaaactacaacagcacattcgctgcaatgagcctgtcggttgtccaaaacaccaaacgttcctgctttggggggaatgatgccacccacagaggggccctgagtcatcctgttcagcaatggttctgtacctggcagacatgccaatgcttgatgcatgaatatacagcagacaaatcagttgtcaccaaataaatgcaattcatgaaaaagcccttttttgacagacagagcccatgattgggtgtgtggggtaacagcagtttaggtggggaggctggagccacacatcgcatggcagttcttggtcttgctgccaccaggacacaggcaagacaggggaccaggcctctgtggtgacgtgtgcctgcccttatcacagtcactcacccacacggcaccctggtcatgctgcctgcccatgcagctcctcctggcacaacttctcagtcaaggaaacaaatggtggagactgggcaggccaatgccaggagggctgagattttgaatcctcttcaatctatttttaaaaggaaacaataatttacagacatggatggaacatgtagaggccaaactgagaagaaaggagaggggagatggggagtgtttacccaagataaagagcaaagagtaccatgctggagtgctctggaatctggcgttcggaataccctttcctctgtgtttccagtcgcccccctcccctgtgtctctgagaggccactcacaggctcccggcccttggtccctgcaggtgaatgctttggagcaagcgatgctagatgctttagtcttagatcgtgtcgactttgtgaagctcctgattgaaaacggagtgaacatgcaacactttctgaccattccgaggctggaggagctttataacacagtgagtgctctagaaaaagggaaggaagcgggaggcagccacctaaatgtgtttgtcactggtgcatattgtgcataaatgtgctcatctgacctccttcagctgggaggtccgtacttaatggcaggcggctacttctcacctgctgctggccacagcctgtgttcatattctcaccacctcctgccatgcctcgccagtcactcctttctcaggcagtattaactcttgtcccgcatttaagggtggtgtgtgagtacttgttgctacaaagagggaatctagctccccaagccattagcagagtgaaatgtcaccaagggtgagaagtcaattgttccttgggaccctcacatttgatgaggctttggggtaaaacatagagctaagtttcacacccaggagctctgctggaagggtttgaatgaaattcccttggcttatattattacaatataagttttgagaatttacatttccttccctattgtaagattttaagtagcagaaatgatcctcagcagctgcttgctaaaacttggtgaatttttttttgtttgttctgagacagagtctctcttgttgcccaggctggggtgcagtgacatgatctcagctcactgcagcctcaacctcctaggctcaagccatcctccgatcccagcctcctgagtatctgggactacaggtgcacaccaccacacccagctaatttttaaaaattttgtagagacagggtttcgacatgttgcccaggttggtctcaaactcctagcctcaagtgatccacctcccttggcctcccaaagtgctgggataataggctcaaatatactaatttgagccactgattctggccaacttgatgaattattaacactatattgtgcaccttaagatactcttttaaaaaaatgcaacagaaagtatttcacaacttttgaaatgtgttggatactttctaaccatgaccagctctgttttgtaaaagaaaaaggctggtgtgggttacactccagctctcacaattcattaattatatagagtagggcaggattttgctcgaagagttcaagaaaaaaacttatttatttatttatttatttattcattcttagacgaggtctcactttatcacctaggctggagtatagtggtgcaatcttagctcactgcagctgcctccccggttcaagtgatcctccaacctcagcctccctagtagctaggattacaggtgcccaccaccacgcccagctaatttttgtatttttagtagagatggggtttcaccatgttggccaggctggcctcaaactactgacctcaagtgatctgcctgccttggcctcccaaagtgctgggactacaggcgtgagccaccgcgcctggccaagaaaaacatatttaacacacatgaatgcttctctttcagagactgggtccaccaaacacacttcatctgctggtgagggatgtgaaaaaggtcagtctactgttttacaattcttacctgttggcatctttcacaaaatcatttcttaagagcaagttttaaattttcaaaatgtattattattccaggcacaggagataatgaattccttctttcgtaaagagtctatttaaaactaagaaagcaaaggataatcttttttaagttgcatgttcatccaaatccatgatagggacactgtcagtgacagccggattataggttgacgccagcgccaggccagggcggccactgggtggggttggggaagggggtggcctggctgctgacctgagccccgctgtctgtccatgcagcctctcgttctgtccctcctttgagatctctcacccactgcctgtggctctttccagaagcaccggcaggaggttcctcaagtcattctgtgtcctgttgattgcagctgctgttcttggccctttctgccaccttgttatcaagggatagatgctttccccagcctgaatattgtttaatcccccacccacccacctgttacatgaactcccaagtgggggccaggacagccacttaccccctagacgtgtgatgaagtccacactgcgaacgcattctcacagggcctgagaccagacttcttttacagagcaaccttccgcctgattaccacatcagcctcatagacatcgggctcgtgctggagtacctcatgggaggagcctaccgctgcaactacactcggaaaaactttcggaccctttacaacaacttgtttggaccaaagagggtagaactcagtgcctgtgtagtgttctgtggttcgcgagtaccatgtggttcctcgcttgcttttcaacaacttggccggttcagagccaagcccttcgccctgtccccagcacagctgtcctgcctcctacagtgctctcaggccagagccacggcattctccagctcccctgagcacgggccgccccgcccatccattgcatttgccctccttttctatccacagcagacttcctcctgggctccggggctactgtctgcctgctccagcctattctactatcccaccactgtacctgccataatcttccaaagcaagggacatgcctgcattccctgcttcaagcctcccagagctcctcactgcctggagaatcgtatccaaactcattatcacagcagccaaggccctccaccagctggccctcacccacatgggagaccacatacctgcaccaaaatcaaatcctgtgatcaaatcaaagacgtgtacctgccacgtctttccccactatcagtgcctttcccacccttatcaaaagtccaactcaaatgtctgatctttcatgatgccctcctctcacacccaccttacagccccacagctctctacatgtctattagggaacttctcggtttctacctggaataagggccacgcgtctgctgagctttcttctcaattaacttctgctgacagaagaagagtttctatattaaagcacttcttttccttggatattatcattaattgttaatgatacaaagtgctttttaatccattcgtatgtccactatcaacaatactgctaatgtactactaacattagttatctaagtaaattgattttttttcttcctctttcaccatgcagcctaaagctcttaaacttctgggaatggaagtaagtagaacttgttttcaacagttttataatatcctggtcaaatatacatagcccttttaagttctgtatttgcgaatatacgatactactcaccaaaatttacctagatgtcttagtcaaattatataaaaggaccatatatacattttctttaatggggataaaagctgcacaatccatttctagaactaacaaaaccacagtttcaaaagcaaagattaagcaaacaaaaaaactagagaggaacaccacttacgtatgcaaaaaccataagtaaaaaaccaaaaataacaccaaaaagaattcaatagactattttcatagtcctaaatcaaagtagagtcctccaagaatgcaaatacaatgcagtgttagtctttaatatattgcatcatatctatgaccatctctcagcaggtgctaatgaagaatttgaaacacatgtaaaacatatgccttactttgttaaaaaatatatagttttctcaaaatagaatgataaaatactttcttggaatgattaaaatacacgtatatcttagagcaagggaaacgtatgatgagcagtgcatccctgaagtcatgtccatgagaatcaagaacaagacaagcatgcccaatatcattggcgtcatctactgttttataattcttacctattggcatctttcactagtccccaaaagtgttctggaaattgaaccacaaggaaaaataaatgctaaaaaaagaatacccaagaaagggagaaattattatcagcaaaaaaatttggggggagttagaaaatccaggaaaatcaactaaagttccctcacaataggacaaaagtaccagaaattacctttactagcaaccgtaagaacaatgtcccagacctaaaaatatttaaatgaatggaagaaatgccatattgtggaatattaggattgactcttggaaacattctttttaaataaatttatgagctaaacagcatcccgattcttcatggattcagtgtagacggctttcattctgtgttgacaattaagactgtcctttaacacggtgctcctggaagggttatgagctttctgtgatctcctgttctctcaaactctccaggtcagggtttatttattccatgaaggtttggtggactcacctgtaaaatttccgggtccagtcctatttcttagaagtgtgcatttcataatactacttcataatagccattataaatataagtacatttcaggctttttattttctagagtcaactttggtcatttatagtttcctaaaatgacttatttcatctagactttcaagttccctggaataaacttttacatagtattctagtttttttcagtctcctcagtatcttcagttgtgtctcatttcttgtgccaattttttttttttttttttttttgagtaggagtctcactctgtcacccaggctggagtgcaatggtgcaatctcggctcactgcaaccttagcctcccaggttcaagcaattctcctgtctcagcctcccaagtagctgggactgcaggtgcatgccaccataccaggctaatttttgcatttttagtagagatggggcttcaccatattggtcaggctggtctcaaacttctgatctcagattctcaggtgatccacccatcttggcctcccaaagtgctggaattacaggcacgagccaccacgcccagcctcttgtgccatttttaaacaaaatttatatctcctattttcttaaactttctttcctacatattttactggtatttttgctttatcaagcaacttcctttttctgtttctattttattaatgtctgcttttatttgtatttgtttcttccatatactttccctactgttattgcattgttcgtgctaactcagtttgaaaggaaaattcactcattttccatcttcactgtattcctataaatgcattaaaggtataaattgttctgagcattgtttcatggtattccacaggtttggataagtagaaccttcattgtcgttttttctaaggcatttattatttccttttcaatccaagagttatttagaagtgtatttcaaatttcccagatacagacttttgttgttgtcatactactgttattgatttcaaagtttattccttgtatagaaatatcctgtaattttttttcaaattcattgctaagtaaggtgtgttacttactcaactatggtaatatgtcaatttttccttacactcccagttcagatcctttgttattttattggtttttttcccttttcctcattgatttgtgacaggcctttgcattttaggaaaattaactctttgtttctcatattctctctctggcagtttttaaagagaatttacatgcaattaatattttaataatattagatgttattgaaaggtaggcttaaaaggacttctgttttataacatttcattagtcattagttaatttttattttatcttatatattcttgaaaatctatgtttatctaaacatttctacgatgttcatttttaacctgtgtagatgaacctttcccatatcactgcgactgtagcttcactgtgacaaaattagaaaattagaacaaagatatttaaattggagtcaagatactatattttccattaaaatgttatcacagctcattatgatattataaaaattgggtcagtcgtggccgggcgtggtggctcatggctacaatcccagcactttgggaggccgaggcgggaggaccacgaggtcaggagatcgagaccatcctggctaacacggtgaaaccccgtctctactaaacatacaaaaaattagccgggcgtggtggcgggcacctgtagtcccagctactccagaggtgaggcaggagaatggcatgaacccgggaggcagagcttgcagtgagccgagatggtgccactgcactccagcctgggcgacacagtgagactccgtctcaaaaacaaaacaaaacaaaacaaattgggtcagtagtgaacaacctgagataggaattggagagccaggatacctcctataactccccatgctccagaccactccaactctgtgaatgtggctgagttattcagactgagccacagcttcctaatctgagggaatggaaggaattcacaacctctcagagtccttgtaagaataaaagaagataactgatgggaacgctgtttgcaaaagaacaaacatctgtttctgttattccattgaatactaaagtattagcctggagtagtctgagacccacatatttcatgccaattttcccaatcacgatctgcctttcttatgaatcctgatccattcacagaacagttctcataacccctttaggaaatgggaaagattggccttcctttttgcaccatatggggaaaaggacagtgctcactaaaagaggaatgtttgctttcttaaaacactggagggaaacctaaaacattttctctagccccttttgcatgtttcctgttaatttctggttcagctacgtctggcaaacgagtgttatttttgctacatttgaagacctccctgaggaaataaactgtagaccttccctcttccatgatgttatttgtgtttagttttgggggaggttttgcttgtttgttttagttttgcagcgtcgcctcagttaaaggcttctaagtaaaactgctgacccaggggtgcaagttatccaaacagtatgccttctcagttcatttggttttagatagtttacttatcataataaacgtgtgcatcttttcaaaagaattcatatgcggagtggaaatgtaagatgtacttcagaagtctctttattacctctgacagaaagggttccctttctccaggagttctggaactctttgttgcatacttttatggcaaaaccatgaaatccatgtttctcccctcaggatgatgagcctccagctaaagggaagaaaaagaaaaagaagaaaaaggaggaagagatcgacattgatgtggacgaccctgccgtgagtcggttccagtatcccttccacgagctgatggtgtgggcagtgctgatgaaacgccagaaaatggcagtgttcctctggcagcgaggggaagagagcatggccaaggccctggtggcctgcaagctctacaaggccatggcccacgagtcctccgagagtgatctggtggatgacatctcccaggacttggataacaattccaagttagtgtctagcggggatttaaaggccaggagagatgaccatcctgagtacttgtctctgcagggaggggtggccaatgtacttctcacttaaggacaatggtggttaaagcttgttcacaaatcacttcgtctgtcatgtcagcatttttctttctgtctctcagaggtgtttttggactgtcgttgtttttgtgtactgccttctctttgcatcaaaattgaaacacaatttttttcctttccttgaaacacaattttaatgcaaagatggtgaaattaatttccatagggaaacacacactaacaaggaatacaacattaatgagcctgtgccctggactgtgacctggactgtgaccttcacaggtgtttctgattttgctccatgcttaggtgggacaggatggctagagggggctggagttgggcgtgcttcccctgggtcagtcaggctctgatcaaaccagcaggtgaggctctggtaaaattggttctcctggccgggcacggtggctcatgcctgtaatcccagcactttgggaggccgaggtgggcggatcacaaggtcaggagatcgagaccatcctggctaacatggtgaaaccccgtctctactaaaatatattttagcccggcgtagtggcgggcgcctgtagtcccagctactcgggaggctgaggcaggagaaaggcgtggacccaggaagtggagcttgcagtgagccgagattgccccactgcactccagcctgggtgatagagtgagactccatctcaaaaaaaaaaaaagttgaaggaacttggaacgtttatggttattgccaaatatttgaatctggatcatgtggggaaggcagtaaactttatgctcaaaattcagcttgtgccaccttctccatgccccccaacttctatcactgtccccatcagtcattagacgccctctggcctgggccctatgacaactatgcctcatccctgtcatagcactgagaatgttggcttctctgtaatcactgtgatggtgaagtgttacacgggcagagaaaggcatacatccgaaatgtccagctggtgacagtccacaggtgggacatgccggcaccaccagcacccagatcaactaagaacctagccggcacccaccagccctcctgtgactcctttcagtgtccacctcccgccaccaccaccaccagcagccccgctactgtggcctccaactccacaggtgctgcatttgaagtcacttttgctgtcttttctatctgcctccctgatctgtgcacaacttgagggaagggactttgtcttctcgtctctatgtccctggggtctgaggggcagatgtggtctcaacctacagctccatttgcagcagtagcagtcagcccacctcctgactgagctcccagccactgtccctggccttccccctttggggacacatccctggagcttcttgcttgcagagaacctcagagcccctccagtgaaggatactgtgtcccgtggctccataagtccttggtggatatgcctgtctaagaaacagcttgcggccactgtggcttcaccctggtcccttctctttccccccagagacttcggccagcttgctttggagttattagaccagtcctataagcatgacgagcagatcgctatgaaactcctgacctacgagctgaaaaactggagcaactcgacctgcctcaaactggccgtggcagccaaacaccgggacttcattgctcacacctgcagccagatgctgctgaccgatatgtggatgggaagactgcggatgcggaagaaccccggcctgaaggtgcgtgcaacgtgctgcgaggcgggccagggtgacagtgacaagtgactctctgccaggctgaactgagcactttctgtggcttatttcatttattccttctagcaaccccctgagggagacgccatgacaatcattgtcttatagatgaggaatctgaagctttgagatgaagtgacatgcctaggatcttagctggtcagcatgggatcagaacctacactcaggtgctctaactccagagccccacctgaccagcccaccaggctgcacaaacccctgccacagtcagagtctcctaatggagccccccataactcagtatgcacacgcaccctggttgggtcgtctacccaccattaaaggagggactggaactctgtttctagattcccttataactctgaaattgtgtattattttaactagtgatgttttcatgacatgggagaaaattacaagaaaataggaagctacgaaagggtttgaaaaagatatagtgggggaaaaattatattgcaatcaaaccctagctcttgggtttactgctgttaactactaggttatcttgagaagagattctaatctgcagataacctagcaatctaatggcagtattatatctattttagagctctccatgaggataaagaaaagactatacgagttacactgtgtagtatggttctggcaaatagagggcactttgtttcttagaaatgtgaatgttatgcttaactgtctaattctatataatatgctaagctgatgttatacataacttaggatattaataaacagttttcagaattccaagaataaagagctctttaaggttttcaggaaactaaagtagatcgcctacatggggatgaacatcaaattggcatcagacttttcatcaacaacactgaaacccagaaggcagcactggagtaaggccttcacggttctgaagggaaggcatttggagcctggaatattttctacccaggccaactattcaaaaagcatgagaaaagaatatctgtttaagacaggcaaagactcaaactatacaccttcaacctcccatgcagaagaattagtttagcaggtagtccaagcaaaaaaaaaaaaaaaaaaaggggaagcatgttttctatctatgagcctgggcatccgggcatccttttgttgtctaggccgagcccatgttagtccttcttttctgagtcacattagccttgcaactcttagttcacataatctcatttatatcaaagttatttctatataaaatacttttggcctacttcactagaggtattatattttatttatattattctattttaatttaaagatttgccttcctcgaaatttcatgtaaggacttttattttattttattttattttatttttgagacagggtcttgctctgtcacccaggctggagtgcagtggcgcgatctcgcctcactgcaagctccgcctcctgggttcaagtgattcttgtgcctcagcctcccaagtagctggtattacagacgtgcaccaccatgcccagttaatttttgtattttagtagagatggggtttcaccatgttggccaggctggtctcaaactcctggcctcatatgagccaccaaccttggcctcccaaaagtgctgggattacaggtgtgagctaccatgccagccaagacttttctttttaaagttaggatcaccaacagtgctgtttgccattcatctaaaaaatttagtgtatgttcttaaattgttttactgcctgcaattctactaatttaccaagcacatgtcacagaacgtcagaccagggataacattccagggctcctaggttattgaataatgttgaaggtcataatttaaaaattttaactatgctgggacatttttctagaattgccacagcttaaaaaatcaatttatgttccgtaggttatcatggggattcttctaccccccaccatcttgtttttggaatttcgcacatatgatgatttctcgtatcaaacatccaaggaaaatgaggatggcaaagaaaaagaagaggaaaatacggtcagtgacacacttgaccctaagcatatcagtgtaatcttgttttcaaaattgttgagatttcttgtaccacagattgagaaatctcactggttaaaggtatttttggaattgtgtttttctaatggtgcctgtgtgccggagtgccttgcatttcccatttagccacctgcctgtcatgtgctgtgctctgttttccaggatgcaaatgcagatgctggctcaagaaagggggatgaggagaacgagcacaaaaaacagagaagtattcccatcggaacaaagatctgtgaattctataacgcgcccattgtcaagttctggttttacacagtgaggcctcctcctgaacatttgacattcagtatattttgaatgctttgatatgttggaatcaagaaaaacttcaagggcttaaaaaagtatctaaaaattcactgaattaaaatgaattatgagaacaaaactgggactaattgagatctctggctaacattggatctcgatatcctgtcacatattgatatatggccatcctagtcccaaatacaccatctcataaggcaaaatagtcacatgctatttgcttaagatgaattcttctgatgcctttagcaatacaaacttaaggaactataattttatttttaaatgaacagagatgactagtgatttaaagagcaaattcacagattccatttttcatgaaattggtggggtcattacaagggcatggctaaatccagatggtaaactcttggaatagggaaacaaatcaaggcgtctcattctgaagtgctcaccaaactgacccgcttggctggcaagccatcctccagccctctctgaggccctgggtctacacagctcccagagtgtggctctctactaacaagaacaggagaggaggcaggagggcagatcagagcgcctctgggggaaatggccgagctgcaggcggtcccagtgggggtggccaggcacactgtggcttgtgcaaccacgtcagtcgggaggagagagacttctcatgaaatcccaagcatcaagccacagcccccgccaggcaggcctcggtgctgtggttgcactggtgatgaggtgagagcagggtatgggacatgaggagctgggtccctggccgtggtctgggcgatgaatgagggtgggctgggggcagagcaaagctctgtgtgggggcccacctcaagggtcagctgagggcctggacacccaaccttgtggcagccaagattgatgatacagtcgaagtcactgctgcccatcgattctggttagaaccatctgagggcctggggtgcacccagcctgcaggagagcccagccatagaggctgctgccggagatggggccaggaagccatcgaggcctctcagccttgggtctcaccccagaccctctggatcgggtggagggtggagtcatcacacattgtgcagcttcgcagggattaggatgcagcccaaagtctgagaacatggctctaatctttcttcaaagagtggatagtggatcttggggtggggcctgcctctctcctggtaaagcttataggcttgggaggcaggatcttgaaaaaaaagaaaaaaaaaccaaactgcccagttacaaatactcagtttttagcacccctcccccaagccttccacaggggcctgtgccagtgagggacccagaagcttaagtttccttggcatcatggtgaatcactggggacaggtgatctacttcagacgtcctcccccaaccccttaactccccgcttttgcctcacccactgccacctccagctctgcctctttccctgccacagagataggggccctgctgtggccacagcaaatcctggacatgccaccagtaactgaggggactctagggtcagctcgcatatctgggtgggcaactcatccacatgtcctctcatctaacttcccagttgtggaaagaatcaggaaggaaatttctgaggcagggaggagtaagtaacattttccagtttccaggaatgtagaagacactccagcaaactattaaaagtttcccgttatcataatgtttgcaacttcatagtttccccatgaggatgacagcaccaaccaatatgtctccatgtagaaaatgaaaagtcagggcccatatcgtgctgaagtataaaatgcctcccgtcctgcctccaggtcttctgtctgcactggtgaggtgcagtgaaggtttcctctcaatgagtcagtccagttggaaacaaagattcttttagatgtgtcaacctgaaagaaaacagcgtttcaaaatttgattgctatgtgattcccccaaacacggctaacagcttgtctttctttcagatatcatacttgggctacctgctgctgtttaactacgtcatcctggtgcggatggatggctggccgtccctccaggagtggatcgtcatctcctacatcgtgagcctggcgttagagaagatacgagaggtggctactccaaaggcctcccccagcccactaaccgctgactgcaaatgcagatatggctccttactgaaaaaacgtttcatgcaaattatgcatgttgggccaggcgtggtggctcatgcctgtaatcccagcactctgggaggctgaggcggatggatcacttgaggtcaggaatttgaaaccagcctggccaacagggtgaatgaaacactgcctctactaaaaataaaaaaaattagccagtcgtggtggtgcacgcctgtaatgccagctactagggaggctgaggtgtgaggatcacttgagatagcagtaattcgaaaccagcctggccaacatggtgaaaccccgtctcaactaaaaatacaaaaattagccggtcgtgtggcagttgcctgtaatttcggctactcaggaggctgaggtggaaggatcacttgaaccctggaggcagaggttgcaatgagccgagatcgcgccactgcactccagcctgagtgacagagtgagagtccatctcgaaaacaaaaacaaaaaaacaaattacacatgctgtgggactttttttggaggtatcacaatcccaagtttattccatttctttatttaagatgtatacatcttgaatgaacttgaacttgcaaatcaaaacacaaggcaaaataaagatatttaataatgaaaacaggtttgaatgcataggaaagcatcagcaaatgctgccagcgacctgagataaaccaattaccgcaactgggcacaaattttggcttagttatttgggatcagagggagaaagagagatacaagagacacttgcacagtgtggtccaaagcccaaagttacaggaaaaatgccatctcttttatctctggactcttgtgcaggagatttatgaagggagggctcccagtcaggaggaaaaggagctaagtgaggtgtggcttcaggtggaccctgtccttggcctaatcctgtagggggctctgagtggactggacactgtggagtctgtctcacctttgggccccacctcaatttgtcattggtacccaccagagacatggctccaagcatctaagagcaagcctcccagaagggggcaggtgtgggcctaacagcagcacctgcagcagatggggtgggcaagcccacctggggaaaagctccaggggatatgggaggggcctagagcgtttgctgcaaacagagggaacaggattttcaactcagtattgcaaaagaacagataccatctcacatatgactcgttatcccagagagctcgagtgaaaatgtaactcccagtaagcaatctctgcagacagcagaggaaagataggccggatacttccctttccaatatcattcagaagttttaattcactaaatttgcttataaagagaaagcatgtatccaagcaaaaaagcaacttgagctgaaaaagcccacagcatcatttcatatcctttctccaactgatatacaaccaatactattattttgcagtaattgttgaccctttcactgaactgaaaaacattattaacctagtccagatagagggaatctgatggcatcggtctaattagagcctgaaaaaccaaaagagcactgaatccaaaattatacttgccaccttctactactgttccttttctagctgggcctcattcaaattctgcaggtgctgcaactggtatttcctgagcggcctgctttaccatcgctgtgccgtcctggccttgctgagggtccaccatacaccgagacactgttctttattccagaaacctgcccccagttataggagagagagggtggccatcggctagtgtgcatgggttgttaaactagtgaatcccttctgtgtgggctgacagatagccactgccccatcctaccacagagatccccaagacctctgcaactgaaggggtaccacctggcatggcaaccctccatcccagtgtggtaccacagacagctgtgccattgggaaggctctgcgcacgcctgtgcatgctgcttgctaaatatcttccattttactctgtggaagtctccccttaagcagcagtgattttgaaaggataatatctcaagtaggggaaaacctggtctaactttcccctaatttctcatgtctaagttgcaaaggaattttgccaaatcaaaacatttcctagtggtattctgccatctccactgggtggactgcccctctgtggggccacgtggggctcatctatgctctagagttttcatcctgtgtgactctggaatgtggagtaacaggcacgtgtccagataattaaaaaagaaatcaaaatgcagctgctttaattacagccagaaggacataatttagaaggcatttcctgagtttgtaaaaccctgaatctaagaatagggaggattccgtggaatttccctttctagatatctctccctgcctgagaagaagagtgtttaaacgttttgagtaggaaaggggccagatgacctggaatgttccatcagtcttattgttccaagattctaagacaagacttctaatacggcatctcagtttattgttctttggggtttgttttcagatcctcatgtcagaaccaggcaaactcagccagaaaatcaaagtttggcttcaggagtactggaacatcacagatctcgtggccatttccacattcatgattggagcaattcttcgcctacagaaccagccctacatgggctatggccgggtgatctactgtgtggatatcatcttctggtacatccgtgtcctggacatctttggtgtcaacaagtatctggggccatacgtgatgatgattggaaagatggttagtagtggcatcctgtgggtatccagagagactttggctgtagttaggacataagaacaggccttgggcatggcttccttcaatttcatttggtttttcttttgcagttggctttttaaaggaaatattctttgctttaagatacacagttctcctacatgttgataacttaataaaatccaatagaaaaacatgagttgagggcctactgtgtatatatacataacatatatacatatatagtgtatatacattcactgtatatatgtgtgtatacatacacacgtacacatgtatatctctctcaatatatatcaggtactcaatatatactgtctcccttcttccataccatatctcaactgtagggtgactaattacgtttgttttttattccttctgatttattattaatgagtctattttgacagcaatataaaagaaaatagcctcgtttttttgtaagagcttacttcactttcccaggacataagagaacatcaatttttgatgcaataggaattcagtagcaaaatagatgtctcaaaatatttacttcttgatggctggaaacatattttcagcattctttagtacagggacatggatttgatgttctatgagactacatccacttcagaatgtatatatatatggccaaaaaaaaaaaaaaaaaaaaccccgcctgatttataacctcctaacatgtggtagaagccggagacaaagggagcccagggccaatccccaacctgtactccagatgatcttcagctcatttactctggcctggagtgaacacaggaagtccatgtgattagaccatgatgacttatactccagaacaggccagagaatatgaaactgaaaatgaaccagcaggtcatccttacattacctaaaagagcttcagtgttaggactggtacaagaagaaagcaagcctcctacatttaggaaggactctttatagggcaagtggttttgagctaagggaagtatgctttagtaaattccagcaagggcctccatcttcagggatgttcaaaattaggaattataccagtttagtatccacagtaaccagggcattgctcagcacttgtgtagtgaatgaataaatgttggtctatactctcaattcattatcgttttatttccttaggtatctgctcctcttcctccttagcatcccttacaaactcccatcttttcttctaattcttccctttctccatttgcagttgtagttactaagggacatgtgtttatgggcaacaacagagaagaagcaagaaggatgaagagcagatgaagatagcaatgttctagaagacattctaggcataaagcattgcatggagtaggaaaaagccttcccagggatgggaagaaaggaagggaaagaggctttcttcgtcctaattaagcactcgtgaagtgcttaattggagacagcaatataatgagccagggtgaacttggcccacaagccaagacagtgagagacaaatgttctccttactcagatgatcgacatgctgtactttgtggtcatcatgctggtcgtgctcatgagtttcggagtagcccgtcaagccattctgcatccagaggagaagccctcttggaaactggcccgaaacatcttctacatgccctactggatgatctatggagaggtgtttgcagaccagatagaccgtaagagtagaattcatagtaagattctcttccctgcttctgaggcagatgatcagttccaaattaatggaagaacatgtattaatttggaaataaaaaatatttgtcactccaccataggcatcaaattattttacaaagaaataagaacaaattatggaacatggattttcagacatcagtcatttcttttattctaaaaataattcactagaattcccttgagctggacctgatggacatcgtgtcacatgaatgcagttctaatgccaatagcctagtttttcttcaacccagtatctccccaccccaggataaggctgatagtgttttccagtagaatgaactagtgaacagagcagagtaactgatacttcccaccatcctcttcttaaagccatcagagcccattttccacatagctacccatttcatacccatttcatcttcactactagagtgctattttgtattatcaaaaataatctggatgttagtagaggaaatgggctatgatcctgcacagatttctggggaatgtaggcccagctcctctgcaggctgagctggtgtcttctggattgaaggaatgtaaagctcaaatgttcttgtacactatttaccaggacagttgaataaatgttccaccagtgaaggaggcacttttagtcccatttccatttcaggaccaacattttcatttgcatgttgtgatttatcataaagcatcagctataatagcatgtctgctgcttccagagctctgctatttgggaatagaaagtttttatcatcttcctctcatatggaatgtagggctgtcagtgtatatctactgcctctaggttagacaataaccagctcatgcagtagcttctttctaacttttataatgtcattctgaccatatcattattgcaagtatcacaaagtcaactattgaagtgtgttagtagcttggtaagccagaacataaaaatctaatttgatttcaaaagaatattagtttaggtagatatacatacacgttaaaagttcctgaattccaggcataaactgtagtatttttattgttgagctcttttttttttaaattaaattgggttatgagagaaggtaaagaggtaaactttaggctgtgctattctcagtaacataattaaatgtaggtttttgattcttgatctattaactaataattttgtagttatttgtgcttatgaggtgtttgtgttggaatatagggagcgcgtgattggttaacctgatcatctgccagtaacatcatgtctttttcacagtatttttaactagtgagcttttgctctcgcttatgacacagggtaaaataaatatccatgatatatattttctagaatgattaatgtatgtaattcttctaaacagatcactgtttctaagtgtgaatcaatatttcccaagcttaaaatatttgcatttcttcacagcaaaacagttatgttgttaaaccacttgttttacttttctctcaaccatcatcttattttctttcctcccctcctgtcaaaacaaaacaaaacaaaaatcctgctttccaatcgtcatgtagtctacgccatggaaattaatcgtaagtttacatggaattgattattctagtctatggaatgtgtttttcaattaccttttccttagctgattactagtagtcttaaactgttttcaaatacttctcttgttttttggtgccagtactttttaagctgtcagtaaaaagtaaagagaaccacaaattcactgttgggatcaccctatttttttaggggagaaatagaccccctatgataaaaagttgcatttcaaatgagcagagggagaaaagattatttttcaaacatggcaccaaaacagttgattaaacaatttgggaagtagaggaaatccctaacccatacaacataacaaaaatattttcaaatttaatgtatcagtgaaaccaagaaaacaaccagaagacaacataagctgatgttaaataattagaagccacaatgactttcaaatggataacgataaagggaaaaaacataaagatacatttgtctgcttaaaaatgaagacttttatatttgaaagccacaataaagaaatgggaaaatgtttagaaatatgacaaataatgactatctctgagcgcagatatgagtttctgacttttttctttgtgtgagttgttttttttttgagacaactgggagtctcgctcagtcacccaggctggagtacagtggctcgatctcggctcactgcaagctctgcctcccgggttcacgccattctcctgcctcagactcccgagtagctggggctacagagtttattttttcccatggaaaaaatattgcttatgaaataagaaagaatcatattaaaaaagaaataggtattgaaaaacatatgtaagagatatttatccttttcattatatgtaaaaagcaaagacaaaactatttttttctttcagctccttgtggtgagaacctatatgatgaggagggcaagcggcttcctccctgtatccccggcgcctggctcactccagcactcatggcgtgctatctactggtcgccaacatcctgctggtgaacctgctgattgctgtgttcaagtacgtgtcacagccgatgaccacatgcttattatttattactgtacagattttccatttaatctcagaacgctcccaagataccaatatatttgcagataatttcattagggtttttaagtagatccaatttttgcagtctctttgttcaaacttaatcagtcttaatgtattcataaatcaagagttgacacttaaatacatttaaatttaatcttggttagtattttaacactttagcatgtattttaatctaatgaaaatattttcttagatgaaagtctcctggggtacagaatatttgattaagtcatgctttttattcatcagcagaggtggaaaaggcaatatgagtttcataagctgttacaattactgtaatactagtaaagcatttttttctgatcatttatagaatacaagataaaatggcctaagaaaaaaatggcttaaagggttaaatcgagtttcttataaaacctgcctatttggcatgttgtgttgagtatgttgaccatgctcaataaatattgaaaaaaatgattttagcttctaagatgaaaaatatagagggaaaaatccttcacagaaatatgcaatcttagaattgaacagggcattggagaaaacctggtccaaacttctggcttgagagatgagaaaactaaggtcagggaaggtaactggttttcctaaggtcccagtattggtagacaatgaaatcatgcacttactgcttcctgttggaagctaaaataagacaaagattgtacctaccccatgtccaaaataacgaaccttcaatcaaataagttcaataactaattaattcagttgaaaaaaaagtagtcatctacttgttagacagaattgaaagtttaaacatgtgaaagcatttagttaaatggcttataccgctacacataggaaattaaatttcctgagtatatgagtagattgtggtgtggtttttcaagaaagcagtacatagcaatttattacacttagctatttatgaatacaatgtccttaagcacagataatccacattgatggataaaccaaaagattggataatcaaggaatcagtactaaagggcactaaaaggccatctcattgagtattttcacttaaatgtgagtaactttgactgctctgggaaatcactataaaaagtaatataactaactgtaaaaatgtcttctttttaaagcaataccttctttgaagtaaaatcaatatccaaccaggtgtggaagttccagcgatatcagctgattatgacatttcatgacaggccagtcctgcccccaccgatgatcattttaagccacatctacatcatcattatgcgtctcagcggccgctgcaggaaaaagagagaaggggaccaagaggaacgggatcgtggattgagtatgtgcagggctcttcatttctaagttgggctgatttcaaaatagtgttcaaattggacatcctcacagaaatctcactcaactacttgctcgtgtgaaaagcaccacactcagtccaactgctgttcttttcaaaaggcttctcattttgtacccattttattctagtttcgttaatttgttagtaattaatattaggaaagccagctcatagagaccagaagttgagctaattctctaaaataactctactctgtaaatttctatataaattcaatgctcctttcaaaacgtcttaatttgttgcatctaaagaaaatgagaaaataatgctatacgtttgactctattcataaaaataagtgcaaaaagttttccaggaaatattacttggctttactttcccagtaaatgtaattttgttttttatgtttaaaagcgggccgtttggctccaactgatagagggttggggcgtatgacaacccctttttagataaaaatcaattggagtagtggcgaactgccttaggagtggcggagaagagagcttaattaaagtggggctgtgaaattctcattgacgccacgaaactgattcttcttgtttttcacgtggccgacacttctcccttcacacagagctcttccttagcgacgaggagctaaagaggctgcatgagttcgaggagcagtgcgtgcaggagcacttccgggagaaggaggatgagcagcagtcgtccagcgacgagcgcatccgggtcacttctgaaaggtacgtgtagcgtccccaccgcgggcccgtgagccaagggtttgctgactcgggcgccccactctatgggggatgccagagttcatttaaacatgcactccgagttctcctgttttatttaaactttaggttttaacgtggttcccacgaaatagtgagaaagttactaggtaataactgtgcattggatatagaagggaatgacatttatttatcctgggccgaaagaaaacctaacagttgactaccttcaccccctaccccaaagtgggggtgtttccgcaaggttaatggaagctacagaaagccatccttctcccagctcttgttcctaacttccctttgcgagcatggtcctccccaggggactgccctcctcatccggcctagctgcttgctgcaccttggcaacacctttcccagcctcacagggcagaggaaaaggctccctcctggggctcccctgagagtgggaactgggaggggtggggtgcagggtggggggtgaggtgtctggccccatgagggtgggatccgctaaactagggcagggtgtgtctttcagacaccttcacatccgcagtacccagcaaggtcagcctaatctccgcggtgatgcttaataaatgcagagtgaatgaatgcaggatgtgtgaaccagtgaatgagtaaatgaagtcaggtcgcgaggtacagaaatggtgacattttccaaacttcgtagtattgctctaccctaagctaggaaagagcaactggcaaagggtagacaggagcaatggaccttcactgtctgcactttttatcacgtaagttttgagagcctttatcatttactaaaagcattttcagcctgctaaagatcttggtgactgataacacgctgttccaaagggtttcactaacaacgtggccagaaggatgagctcagaggagccatgcctagctctgctttctatccttgagtacacagaattaaagtttcctaacagacacattgagagccataaaaacagggtgggacttcaaaaagatattgcagctgacagttcccaaacaattacaacagaattcacagatgcaccttaggtctccctggtgcatgttgaggccagtgaactctgccccagcccacaggaggggagatggcaactgtgggtccctggcctcggttccctcctagacccagtcaccttgtgacccaaccaaatccaaccagctaaactctagggttacctgcaccacctttcttccttaccaaggtgaatttttaataaaactttgaaatgtttctttgatgctttaacagtaattgctaaactttcaaggtataaaaattatttcttcatgagaaagttaaggtaccccatgtaatccaatttccactttttagttagacattaacttgaacgtaattttaaccagtcatttacaatggagattgtgttttgttttgctctgcctccccctctcccttccccggcattccttggatttttaccattcttggaccaaagctgcaagagtgtggttatcaggtcactaccaaattgcatttttctctgggggctctgtgcacacgtaatagggatgaaagtgtgtagggcagagaaaacatgctgcttcctgtttccctcggctgagatcccaggagcgatgggagcacattcttgcccctccatttcccttggccttgtcaggctgactcacaggtgaatgcccaagacagaaagaggagaaggcttgaggagaagggagttttccttccctcttagccaagccagctgagaagcaagggataaggtgggaggatggaaataaaagtagctatttgggcacctgtgactactttaaaaatcacacttgaagtactcaagcatttctgccatttctttaatattctttctatataaaattagttttattttctgcatcaccatttcccatttgatgattttcctgctcttctctcggtcgtgtcttcgccagcactattcagtctgtagggtctggttaggagcatgtcagcccctgccttgtctccctgttgtcttggtagctttcagagctgagctaccaattctcatgactcagttttacaggcgtgttcacacaggatgggtacccattaatcattctcctccacgcagggtgcttttagtgcttctgtgcagaaaccaaattcatggttctctcctaatgtttggaaatttacctataaaatgctaacaatttaaccatttattttttctcaaaaagttccaacattttgtaagatccaacattcagtcctgcaatgagatttgcaatacgattcagcattgattgacacaacactgggtcagtcctaccaaccacgcccacttagatgtcataggggccctgctctcagggttctcctcccaaacttgcactccagtctctgtgaatggcatcgccattaagctcagttagcaaactggcaaatcattgtggcacctccctcttcttcactaacaatcatcaagttctgtttacttcccctcgtgaatacatcctgatccacttatttttttcatccctaccccaacgcacctagtacaggcttccatcattttccacttccattcctgtagctgcccctacctgagctctccatatttgtttctgctgtttcaatccatgttgcactgtcagctctcatggggtcctgttccctcctgcactggctttcctgaaaaaccctctgtggcccccactgtcctcaggcctgcaaggccctgccctctctctggctttgccatgcactatcttctccttcatgctctgtattccatttctctttcatttcctcaaagcactgcttccttcctgccacaggggctctgcatgggctgtgccctctgtctgatgcacctcaccctccttccctgctcctcttccttggatctctgcccaaatgccaattccttatggaaaacttcaccacctcacaccttagactaggtcaggaccctcaggccttaagctgcatgaaggcagggccatgtctgggtttggtccaccatgatatacctagagcctgcacatatccacatagtaggagccagacttttgtttctgtttttgtttttgtttttgtttttgagacaaggtctcgctctgtgcccagtgcagtggcacaatcaggtctcaccacagcctcaacctcctggactcaagcgagccttctgcatcagcctctgaagtagctgggaatacatgtatgtgccaccacgcccagctaattttttttattttttattttagtagagaggaagtctcactgtgttgcccaggcaggtctcaaactcctggcctcagcaatcctgcctcagcctcgagatttttttgaacgaatggatgacttaaaagcttttctcctgattcgaatataaatttctatcccatccttaatgagttccctcatggaatatcaaaaaggaaaccagctatgctccctccaggttcaagacactggttttactataaggaagtaggagcagactcaagagccaaaggattgtgccacaggaaggataacaagtgttggtgttggcaccatctttttgctcaaagggataacatcaaagagccatgagggctggtgggataagaacattttataaacaactccttttttattattatttgtagaaacagggtctcactatgttgcccaggctgatctcaaactcctgggctcaagctatcctcctgcctcagccttccaaaatgctgggattacaggcatgggccaccatgtctggtcaacttctggcagcatggccaaagtagacctcgtcaacccatgtgttctgtcctcattgctccaggagaatatttggcaacatgagtccttatcattgggagatttgaggctatctgtgtcttctgcacatccactacggagcacactgttctctttgtggttcagcatcccttatcacaggttcacaggttcaagagcaattgggctagaaagaatctttcctgacaaaattttgtcagagacccaacttccttttctcaatgagaattatgttatccagtgtgttttccttttttccatggcttcaaggaagcttaacaccaaacttaatattaaattatcaaatatattactataggattttgaaatatgtggggtacgttgcctcttctctgctttttttatatcgtctacctccatttacatacattttattaatgtctgacatttcacaatatgcaggatataactcataaattatacattttaagtgtagttggccttgtgcttaagaagctatgggtcttagatgagctaaacctataatagcattttctgattcccccaaaactttctggattaagtggtttcttgtcagatttgtggatatggattaaagtgttttgtcttttttttttttttttttaattctagagacagggtactgctttgttgcccaggctggagtacagtgggatgatcatagctcactacagcctccagttcctgggctcaagtgagtctactgcctcagcttcctgagtagctgaggctacaggcgtgcaccaccacacccagctaatttttgcatattttgtagatacaggatctcactatgttgcccaggctggtctggaactcctggcctcaagcggtcctcccgccttagcctcccaaagtgctgggattacaggcatgagacatcatgccccatcctggattgcctgcaggcttgatgggaaatcagcaatttgtggctttgaaatctttttatttggcatcctcttcccatgtgaccagaaagagaaatggctggtaatggagacctacctagaagaaacaagatagtaactagaggaactgaaagagagatcagtcttaggaaggaggtgggggattctttgcatgtagagaaggttgtagaacggcaaatgcgcagtgatggggaagacatttggggatgatcctgtctgaataccttaatcttctaaattcatagggttcaaggttgcttggataataggaaggagatggcttaaatgttgaaattttgatgtgccagtggatgacacccttgttcctgatctgactttgaaagccaattcagagacagatgcagacttcaggaggatagagaaaaaaaaatcagttttattagtaataaaagttgtactggagggtgtggcttcgttcttgcctactactcacccagaattaggaatacccacttagccacaggcagcaccagccaccacaggcctcgcttcccacaggcagagtttagcctgcgcgctaagcctaccagaagaccaagacagagagacaagcatgcagtatcctggtccccaatctccaaccaaatgagccgtcctcctccaaaataaataaaggcctggaatgaggtcagagcattactaatgaaaagtccacatacatagaaagaaaaactaggcatgggcaaagtgtacctctccaacaatcaacatcactgacttaaagccagtaggaaggattcaagtcaagtgagttcacttttagggggaatatggcaggaaaggagataaccaggattgcttggcaggaataacaaagatgcaagttaaattagataacatggctttgtactgggccaggtcagtgtggttcccatgaccttcatcggtgacaccgtacagccgaaaggcagggatacagaaagacaactgtacatacggcatggatgctgaaggaggccatgcgcccaaaaaccagtctgtggagagacctcaaagatgctagtgtttgcaaatggcagcataaacatacgacattgcctccaggcaccaaatatccttgcttagtcctggagtcctggtagcaataggttgggggttagggattggcactaacgtgttgcaagtaagggagaaagaacataggttattaatgagggcttcacttcgtggccaaccacagaatctggcctgaatagaaaacagaacataaccagaaaaggctaatgattagatgacttgaattctataaacccaggaagtctggggtatgtttaaatgaggcagcatacagctagaatcccagaaagcttaatgttcttttagtaactattcagtatactgtttattacagagaatgaaaaagccagaagaaagacatgagtcttggccgggagcagtggctcacacctgtaatcctagcactttgggaggccgaggtgggcggatcacttgaggtcaggagttcaagaccaacctggtcaacatggtgcaaccccttttctactaaaaatgcaaaaattagccaggtgtggcagcgaaaggcctgtaatcccagcactttgggaggccaaggtggatcacttgaggtcaggcgttcaagaccaacctggtcaacatggtgaaaccccgtttctactaaaaatacaaaaattagccaggcatggtggcgaaagcctgtaatcccagcactttgggaggccgaggtgggcagatcacttgaggtcaggagttcaagaccaacctgaccaatatggtgaaatcctgtctctactaaaaatacaaaaattagctgggagtggtggtaagcatctgtaatcccagccactcgggaggctgaggcaggagaatctcttgaacccgagaggcgaaggttgcactgagccgagatagtgccactgattgcactccagcctgcgtgacagagactccctctcaaaaacaaacaaaaaaaagaaagacgtgagtcttgttcttttatgattagtcttcatttagtctttcacacataaaaactctgtaagtaagcacaacaaggttctatcctggtgttcttcctataactactaaatgtaaaaggcagccctgtatgaagaagtggatggaaattaaaatagctggatgtaaaatttagagtggataagacaactttatgatcagtagttctggaattaaattatagggtaggaatagttttagaactcaagtatagaataccatgggatcttgaaacaggggtttcttcaagtatgaactggacctagctccactaacatcatgtctttatgttaacatttaactctatcattaaggaaatgttcccatataatttatgagattccttgcaggtgaagggcaactgtttcccatgaaaagataactgcatataaaacaagttttaggctgggcacagtggctcacgcctgtaatctcagcactttgggaggccaaggtgggctgattgcttggggccaggagttcgagatcagcttggccaacatggcaaaactccatctctactaaaattacaaaattagccgggtgtagtggcacatgccagtaatcccagctactgaggcacgagaatcacttgaaccggagaggcggagtttgcagtgagccaagattgcacccctgcactccagcctgggcaacagagtgagactctgtctcaaaaatttaaaaaggccaggtgtggtggttcatccctgtaatccagcactttgggtgctgaggcaggtggatcacctgaggtcaggagttagagagcagcctgaccaacatggtgaaaccccgtctctactaaatacaaaaaattagctgggcatggtggcgcatgcctgtaatcccagctacttgggaggctgaggcaggagaattgtttgaacccaggaggcataggttgcagtgaaccgagactgcaccattgcactccagcctgggcaacaaaagtgaaagtctgtctcaaaaataaaatgaaaaataaaataaatttaaaatttaaaaggccaagtgtggtggctcacgcctgtaatcccagcactttgggaggccgaggcgggcagatcacctgaggtcaggggttcgagaccagcctgaccaacatggtgaaaccccatctgtactaaaaattcaaaaattgccaggcgtggtggcacatgcctgaaatcccagctgtttgggaggctgaggcaggagagttgcttgaactcgagaggcagaggttgcagtgagccgaggtcgcaccactgcactccagcctgggcgatagagcgaaactccatctcaaaaataaaataaaataataaataaataaacaaataaataaaattaaataaaacaggttttaacaactggcttactacagaactccagatgtttcagtccttcctaggaaagacacacagggactcttaccacaaggacatgagtttggaccttatgtttaatagacaagagtctatgcaaagtccaataaagttatgccatacataggtattctcttggaagttaatgcaaaagttccacaaattcaggtattgccatacctattatttgaatgaaacagaacacattatgtacaaccccttaacaaaaagtatgttttcatttaaccaccttcaggcttagtggcatcatgttcaaaatcaaatatccttaataatagatataccccaatatagagaagatttgcaatgatattcacacagccatgtcctttgacacttgtgtagcatttacagttcacagagcacacagtttcatttaattcatttaatttagttgctgtcatgctgcaactgttgttaatgtttgataaatcactccccagggacagaagtacaataaagaggggctggtggagtagcttcatcccgaatgccaatgtggatgggcacatctcaaagggaacactgacactggccatatgttaatcagaaacagcttttgttttttctcaaaaccaaattaaacaaaaagagtcatgacatgtaatatcagttgttaatctggtacaatcttttactctattttatttatgtattttgagacagagtcttgctctgtcgctcaggctggagtgcagtggcgtgatctcggctcactgcaacctccgcctcccgggttcaagcaacctttgtcctgcctcagcctcccgagtagctgggactacagacgcacgccaccatgtccggctaatttttgtagttttagtagagacgggggtttcaccatgttggtcaggctggtctcgaactcctgacctcaggtgatctgcccaccttggcctcccaaagtgctaggattacaggcgtgaaccaccacaaccggccgactttcttaatttaaaaaacaagttttttttttgtgtgtgtgtgtgtgtgtgtgtgtgtacgccaggttttgagactgattagggcattcaggtgtatccttttaacagaaaagcccaaagatttaatctgtgagtcaaaagatgaatatgggcgtggaggatcacagctattattaatcatgactgattaagcacatgcggttctgggctcctcgtgactttagtagcagtacacatgatgcagttaaggacagagcaaatattgtaataaatcaagtgcagcttaaatttctattcaaagtcaggagaatgattaattggggcccagacagtttatagatttcatttgtttatagtttcctttgatacaaaaggatggagagtggccctcaggaattgctcttaggcctgccagttaagaaatcatgtatttggtggttagaaaaatggcctcattaatgaccttttcaaaagtattcataagtggaatttttttctgtgaagtcagtgctaccataatgtgaaaaataaaaacctagtggagctatttatagcatctacaagtaaatccaaacccagaaatagttacagaagccacaaacttcaattagagggaaaggaagataatcaacctgatcagaaatcagtgtcaccatgtgtaagaaagcacactttgcatcacaaaagtaccactattcaaagaaatcatttattagtgctgaatacttgttatactaaaaacatagttataagttatttcactatgtgatttgaaatatttgagggtattggcatattttgtaaagtgaatattattttgaaaaatttcgcaaaccctataataaataacacagccatgataatctaattaaatcatgcctaaagccaggatagtaacgtacgtttacatgcaatggctgaggtccctgacatcaccaagacagctttcatttatctagttcttccacaaacatcagaggtagctgaaagctctaggacaggttttctcacagctggggtcatcaaatgccttggcatttggggttctcaagttctaagattattttattttttaattttgatgatgacggcatgtttgcaaagggtccttgaggaaatgtggggatgaagaacaagatgagacaggatgggaagatgagggcagattctcaagagctttgaatgtatatgagtaacagaaatctctatagggtgttaagattaagggctgccatggatggaaggaaagagttaaagctacattttcatagcactttacatagtatgaggaagtgtcaatgtccaaattgtagaatagggttgccaatggagattataaggttttcctttaatacactctttggtttgttcattgcattcaacactgcaatgaaattgtgtttttatcttaagtgtgatgggaagctgctattgttttaaagcaaagattgacgtgcttgtgtttctgtgctatctttttggagtgagaagacattggaggcaaagaggctgttccttataactaacattttttgctttatcagcttggggtacaacatgaggtcatatatcttttttctttttctcttcttttcttttttttttttttaagacggagtctcgctctgtcacccaggctggagggcaatggcatgatctcggctcactgcagcctccgcctcccaggttcaagcaattctcctgcctcagcccccaagtggctgggattacaggcgcatgccaccgtgcccagctaatttattatttttattttttagtagagatggggttttgccacgttgttcagactggtctggaactcctgacctcaggtgatccacctgcctctgcctcccaaatgctgggattacaggcgtgagccaccgtgcccagccaaggttatatatcttttaatattaaatgaaattattctttgacctcatctcatctgcttataatctcatctgtttattccaagagtacctttttccctttctattgtcccatagccccacccccaccccctgcctcaagtcaggtgcaggaaatccagtggtctggtgaagtccctacccactgcatcaaaattcaagagggtgaagtcaatcgttgctctttgctttgatttgagccccagctttctggttggaggatagaaaacggaaactctgaggaactggagatatcagggagatagtgagagggggaacttggaaaagtaatgccataaagttatgaactccagagctcacctgcagactgtgtctgtcaggggtggaggagtctgctccttattcacataccaaaggcattgaatggggtgacatgaacaaaagcaggtagagtaaggaactctggaattctgccccaccataaaagcaacaacaaagttggcaaaaactgtcagagtctatatcttgtggcactctggaaattaagcaatggcttattaagcaacctagggcattcttatttaaacaaaatggctggatcttgataagaaaagtgagctttgtgacattttaacttagccctgtcctatcctctgctctccagttgagtagtcaccttgaaaacaacaacctgcattcctagtaccagtaggagcagaaagaatctcatatgcaaagaattataattacttgttttgtaattacagggcagctccttgaaagcctagctgaaaggttcgtctgtatttcacctgagttggaacaggcccagtactaaagcttctagttagaaggggtggaggaagggttgtcaaaaacatttacaggcaaagggtttagtgcttgctccctgaggtgacggatgacagctggggcaaacaatagactaaccaaaaaactagggagaaaaactgatgtccataagagctttgaaaagctctaacacattcctgggaatttagaaagctatgtgcatgcatagggctgtgtgtatactcaggaagacctgagaaggctataagctcatttctggctgacttgatcttgaggctctgtgcaagcaggaagtgaaagctaaagcaaagatgtaaactgcctgagtgttgaagatgtgcccctatatacacatacagcttctcagaaaagactagaagattttgttgtttttgttccacacatttaaggaaatctctaagtattaactgaccactaagctaataaaatacaaacttcagtggccacacaacataaagaatatagactttacaatattatttcagaaaaatcactaagcaaacaacaactacaaaaatcactaaacaaacaacaaacaacaactacactaaacaaacaacaactacactaagcaataacaacaagcctgagaggggagagaatctgatttctagaattgccacattataatactcaacatgtccacttttaaataaaaatgacaaaacatgcaaagaaataagaaactatggtccacacacaggaaaaaggacaatcttaaaaaccatcccttaggaatcctggatattagatgttttagcaaagagtttaactcaactattttagctattttaaatatatttaaagacctaaaggaaatcatctctaaagaactaaaggaaagtatgagaaggatttttcaccaaataagggactatcaataaagaggtggaaattatatcaagtagtagacgaggtctcaaaaaaaaagaggtagaaattatatatatttttaaaaaaataggtcaggcacagtgactcatgcctgtaatcccagagctttgggagaccaaggagggaggattgcttgaagccaggagttcaagaccagcctgggcaacagagcaagacaccatctacataaaatcatttttaaaactggacaggcatggtggtgcatatcatggcaactggcagagcatggtggtgccggtagtcctagctacttgggaggctgaggtgggaggattgcttgagcccaggaattcaaggctgcagtgagctgtgatcttgccactgcattccagcctggacaatagagcaagacagtgtcaaaaaaaaaaaagaaaaaaaaaaagaaaaagaaagaaatgaaggaagggaaggaaattctgacattggaaagtacaataactgaaatgaaaaattcactctagaggcccaatagcacatttgagcaggtagattaaagaatcagcaaactggaagataaatcagttaaaaattacccagtctaaggaacagggggaggaaatgaagagaaattgaacagtctgaaacctgtagaacaccatccagcagaacaacataggcatcatgagagttatagaaagagagaagggaaactggcagaaacaatatttaaagaaataatggccaaaattttacaaatttaatgaaagatacgaatctacatatccaagaagctcaatgaactccaagtaggataaactcaaggagatccataccaattaacgttatagtcaaactgttaaaagccaaaggaaaagaatcttgaaagcagcaagagagaagcaactcatcacatggaaaggatgcttaattagattaaaaaagctgacctctcatcagaagccaggaagaccagaagaccttgggatgacatagtcaatgtgctgaaagcaaaacaatgtccactaaaaattatatatgcagcaaaactatcctttaaaaatgaaggataaattaagatattcccagataaccaagaactgagagaattcattactagcaaacctactatgagggatactaaagatagtttttcaggcagaaatgaaaagacataagacaataacctaagatccacatgaagaaataaagaggaccagtaaatttaactacataggtaaatataaaaggcattataaatgtattttttgtttgtaactactttttattttctacatgatttacaagacaaccacataaagcaatcattacaaatctatgttgatgggtacacaatgtacaaagttgtaacttgtgataataacagaataacatggggggaggatggagctttataagagtaaactttgtgtatattattgaaaataattggtgttaggccagatgcaagggctcacacctctaatcccagcactttgggaggcgaaggcaggtggatcacctgaggtcgagagttcaagaccagcctggccaacatagtgaaaccccatctctattgaaaatacaaaaattagcctgtgtggtggcacatgcctgtaatcccagctactcaggaggctgaggcacgagaatcacttgaacctaggaggcagaggttgcagtgagctgagatcttgccactgctcttcagcctgggcaacagagtgacactccatctcaaaaaaaaaaaaaaaagtaattggcattaaattaaagtagactgttataaattaagatgttactgataatccccagggcaagcactaagaaaataactgaaaaacatatgataaaagaaagaacaagagccaggtgtggtagtgcatgcctgtagtcccagccactcaagaggttaaggcaggaagatcacttaagcccaggggttcaaggccagcctaggaaacatagcagggccccatatcttaaaaaagaaaagaaatactaagtgaattaaaatgatacactagaaaatacctatttaacacagaagaaagcagtaatgatggagttgagggacaaaaaaaaagacataacatatagaaaataaatagcagtatggcagaggtaagttcttccttaccagtaattatattaaatgtaaatagataaagctctctaagacagagactagcacaatgaatatttaaaatatggtgtaattacatgctatctgcagagactcacttcagattcaaagatttttaaagttttaaagtaaaaggatggataaagacatttcatgcaaacagtaataaaaaaatagttggagtggctacacctatcaggtaaaatagactctaagacaaatattgttactagagacaaagaaggacatgatagacatgatataatgattaaaaaggtaactatatcaaaaagatataacaattataaacatatatgcacccaatagcagagcctcataagatatgaagcaaaaactgacagaattgaagggagaagcagatagttctcaaataatagttgtaggctctaatattcaactttcactaatattagaactagacagaagttcattaagaaaatagaagccttagccaatactatatgccaactcaaggtaacagacatcagtagaacactcaatgacagcaaaatatatattcattttataagcatatggaacattttccaagatacatcatctgttaggccataaaacaagtctcaataagttttaaaaagatttaagttaaacaaagtgtattctcaggccacaacaaaataaaatgataaattaataacaaatgaaaatttggaaaatttacaaatatgtgacaattaaacaatacactcttaaataatcaatagatcaaagaagaaatcacaagagaaattagaaaatacttcaaggcgaacaaaatgaaaacacaatataccaaaatttatgggatacagtaaaagcagtattcagaaggatatttataactataaagacccacatgtaaaaagaagaaagatctcaaagacagtaagaactgaagtaatgaccagactgctaccaaggtcccagactgactactgggctgcacgcacataggtcagatctcaatagcactacaaagactttgaaaactgaactggcattggaatcacagtccacagaaagcatgtcagaacttgcagcctgaaactaaccaggttgatcacctgctaaaacaaaacaaatcaacattctccatgaaaattaaacaagattcagagtcatgtggtataatattcaaaatgtcaggctacaatccaaaatcatttggagtatgcagaatatagaaaatctcaactcacctggggaaaaaagacaatcagtaaatgtcaatgtcaagataacacagatgttgaaattatctgacaaaggctttaaagcagctattaggaaaatgctttaacaaaattgcaaaggctctggaaactaatagaaaactagaaagtctcagagaaagaatagaagatattaagaaaattcaaagaaaattttaccaaaaaataaagtaagtgcaatgaaaaattcattggataggctcaatagcaaaacagggattacagaggagagagtaaacttgaagatattacaacagaaaattactcaatttgaacaagagagtaaatgggctaaagaaaaagcccaaagcctcagagaagtgtggggcaataacaaaaggtataacatttgtattataagagtcccagaagagaaagagcatgatgcagagaaactacttgaagaaatcactgaaaacctcccaagtttgatcaaagacgtaaacccacagattaaataaatgtagagaatgctaaataggactaactcaaatgaatccatatcaaatgaagggccacaaactaaagacagagggaaaaaaattgacagcaaagaaaaaaattgaccagagaaaaatgatacattacttactggagaacagtgatttgaatgatggcagatttctcatcagaaaccttggaggtcagaaggaagtagcactatgtttttaattttaaattttatttattttttgagccgaggtctcctgtgttgcccagactgaactcaaacacctgggctcaagcaaccctcccaccacaacctcccgagtagctgggattacaggcacaggtcaccatggcctgcattatgtttttaaagtgctgaaagaaaaaaatgatcaacccagaattacatactcaacaaaaacattcttcaaaaatgaaagtgaaaaaaaaaatcagacaaagaattcattgctagcagaccaattctaaaagaataactataggaaattcttcagacagaaggaaatgataccagaattgaacttggaacatcaaaaatgaaagaagagcatcagaaataataaatatgttgataaacataaagatgagtcttctctttctgagttctttaaagtatatttgacagtcaaaagcaaaaattgccatactgtctgatggcattttcaatatatgtggatacaatatatgacaactgcagcacaaagggctatgggaaagggacctgtatggtagtaatgttcctacattcaaattgaagtggtaaaatactgatgctatgtatactgtgaaatgttgctatctatttgtaatccctaaaacaaccactgtaaaatgtatagtaaatgctgtggtcacttcccacctcatttcctgaggccatcatcaccatgataccaaaaccagacaaagacaattgaaaaaagaaaactacagaccaatattcctcatgaacatagacacaaaaattcacaacaaaatactagcaaattgagtctagccacgatcaggtagtttatcccaggaataaaaggctaggtcaatatttgaaaacaatcaatgtaatccaccatattaatgatttaaaggaaaaaaccctatatgtttctagcaattggtgcagaaaaagcatttgatgaaattcaacatcatgatgataaaaatacattttataaaagtctctcagcaaactaagaacagaagagaacctccttaatctgacaaatggcatttacataaaatctatagctaacatggtgaaagacagactgctttctccctaaaactgggaacaaggaaggatggccactctcaccacttcaacagtgtactggaagtcttaggccatgcaataaggcaaggaaaaaaagtcttctgtcttggagagaaatacataaatacataaaaccattcctatttatagatgattatctatgtagaaaatcacataaaatctttaaaaaacaaaatgaaacaaatgaaaacgtcctagaattaataagtgaatttaacaaggctacagagtacaaagtcaacaaaaattaatcttatttctatataccatcagtgtgtaattgaacattggaatttttaaaataataccattctcacagagctccaacaaaaatgaaatacttaggtataaatctcgtaaaatacgtatgggatctatatgcagaaaactacaaagtgctgatgaaagaaatcaaagatcacttaaataaatgggaggatataccatattcatgtattggaagactcaacgtggcacagatgtcagttctccccaagtttatctgtagatttaacacaataccaatcaaaatcccagcaggatattttgtagatataggtcaactgttgttgttgttgttgttgttgttgttgttgttgttgttgttgctgcgctgctgttgttatagacgaagtctccctatgtttcccaggctggtctcaaactcctgagctcaagcaatcctcctacctcagtctcccgaagcactgggattgtaggcatgagccactgtgcccagctatgtcaacttattttgaaaattaaatggaaaggccaaggaactagactatgtaaaacaattttgaaaaagaagaataacattagaggaatcacactatccagttttaaggcttactgtgaagctacagtaatgaagacagtgtggtcttggtgaagggtccaacacatacataaatggaacagaataaagagtccgggagtagatctacccaaatagagataattgatttctttccccaaaggtgcaaaactaattcaacgacgaatggatcatcttttcaactaatggtgttaggacagtttgacattcttatgcaaaaaatgatctcaacacatacaaaaattaactaaaaatggatcatagatctaaacataaaacacaaaactataaaatgtttggaagaaaacataagagaaaatcttcacaacttgggaatagacaaaggattcttcaatgcaacaccaaaagcataatcatgtcaatcatatatctgacaaaagacttttatacaaaatatctaaagaactctaaaacccataatatggaaaaaatggcccaataaaaaaatgagctaaggattagactagacacaccagagaggacataaggttgttaaatatgtacataaaaagatgctcaacatcattagctatcagtgaaatgaaaattaaaaccagaatgagatatatctacacaccgaatacaagagctaaaaataaaaaaaattaaaaataacaatagccaagaaggatgctgagcaactggaatttgcatacactgctagtaggaataaaaaattgtacagccactctgaaaaatggttgggcagttgcttataaagttaaacatacatttaccctatgaatcagcaatctcggctatttaactcctaggtatttatcctacagaaatgaaaacatgttcacacaaaacctgtacatgaatgtttatagcagctcttttcatacttgccaaataatggaaacaacccaaatgtccttcaacaggtgctgtggcacatccatattagaaatatatctttgccaggcttggtggctcatgcctgtaatcccagcactttgggaggctaaggcaggtggatcacctgaggtcaggagttcgaggccagcctggccaacatggcaaaaccccgtctctactaaaaatacaaaaattagtcaggcatggtggcgggcgcctgtgatcccagctacttgggaggctgaggcaggagaatcgcttgaacctgggagacagaggttgcagtgagcggaaattgcgccactgtactctagtctgggcaacagagcaagactccgtctcaaaaaaaaaagaaaagaaaagaaaagaaatctttaagagagcatcaaccttaattaaagggaaagccaagtgaattacttggatctggaatgcttctgtattctgtaatgtgctgaaaaatatttttcactctgtgctgaaaggaaagctggattaagacttagaaagctacacaaataacttctttgctgattaatcatatctcactatgagctctatcatgcatgatggattctcttgtgtttttatgccattcaatgtgtaaatagatgtggggctcttgtcaaattgattcctagatagcctttctctgtctgaaatggaaaccactctttgtgtgggtgtcaaggtttgtgaaacatgttttaaataattatgggaagtcaccaaccatggttaacaaaggagatagatcctcatttatttgtcctttatgttaatcatttcagatgtaagtgaacttaaactcatttttatctttcttctttcatacgtactataaaactcaatgcaacttcccatcgtttggcatagctgtttaaaatttgctgtatccacgttgtagctgttcacaagctccaaacaagcaactgacaatttctctgaacccagggcacatcattaagcattgtttcttccacagcttcaatgaagggagcagcagtagggatgggagatttgagacaccaaaaaaggagcttggtaactgattcaatgcagaggggaggggagaggagagaagtgaggggagggagttagtataagggagaccaaagaatccaatgactttgaggtttgtttttcatatatgagtggctgagagtgctgttatctgaattaggtaataaaggggaaaataggtaaaactataaaagatttgaaaggaaagatattcatcttcatttcaccagtgtatttatttagaaaagtttgcacagcggcaatatctcttactgtatgtttgtaaaggaactcaagtttgactagggcaatgtggggttttttttgatacaaaaggaataatcagggtaatagaactgaacggagtagggagcctttatttatttatttatttatttatttatttattttttgagatggagtctcgctctgtcatccaggctggagtgcagtggtgcgatctcggctcactgcaacctccgcctcctgggtgcaagcaattctcgtgcctcagcctcccaagtagctgggattaccggcacacaccactgtgcccagctaagttttgtgttttcagtagagacagggtttcaccatattggccaggctggtcttgaactcctggcctcaggtgatccacccgccttggcctcccaaagtgctgggattacaggtgtgagccactgcgtgcggccaggagccattatttttaatgaagaacaccaagtcttactcagaagtaatggaaagttaatagtgaaaaattcttctgttggtctctgaaatgcaagaggagagagaacccttagaacctacagtgcctgtgatacagaggctttaaaaaaaggaagccaggacttctcatgcatggtgaatttggtcctccctggtggcaaacgtccaggaagccagacccttcctgctcaaatgatgtggtttcctatagtacatataaatagttctcaccccaagaaaagagttaagaatagaagccaaggaaccacacatacaaacacagacacatcagagcacagttgtcaatgtggtcaacagaagagtggcattagcaaaaaaaaaactctgggaggtggggcaaggtagccacagaagcagcagggtgggggtggagttcaggagatgcagtcaagcacagagctgacttagcgatgcaaacagtggcaggcaatctgctcagaagacaaaagagcggggtggctgaccaccgtgaaatggatggataagaggagagccagcagtacgagtgaggacatgtataaggatgtgcagagaaggtagcaaagaccttcgtaggtcatacagactgcaatgcaagccaagtctccctatgtttttaagaaagctgggagaaaataaaagaataatggaatcagacctaagtgtttgccatcacacagggatgaaccagccagaacacagtagccaggactcctagctccatcctggggacaaattcaacttttagaaagcaatcctcaatcctgggcataccttgcctcttagagttaaattcctattgaaataattcatactgtatgtagtaaaatataaaacaaagtctgtaccagtggattttaggccaggcaacattatggtttcataggctgttgcccgatcttctaagaactgaaaaaaaaaaaactaatagcaggcatttataatctcccatgctcttttttgtgtgtaaccttaaggaaatactaattattaaatataaagaataatttaaagtttttggtattcttcagacaattaaatcacctactatcctttaagcaaactatctgataatctgaacttaattattaacagtttattttctgaatcccttgaacctcaataaggattttaattttatttattttgttataaccattcactgctgacagccatagtcaaagctctaaaaactaagcactagtagcttctgttattactacaggcagcatgatgtaccagctaagagacaggcaccggagtgagtgctggagctaggctgcgtgtgctcaaattcctgctccactgcttcctacctttggggaaattacttatacgctccatgacttaatttcctcacctgtaaaatggagatgataataatagacctacttccaaggactgttctgaagattaaataagcctaggattgaacctcagtaagtacctgttagtgagaacattatgctcttagaacaatgactgagcagtaagtactatatgcattaactatttatttccattattttctggtggctcctcatggtaattcgagtagtcatgttaggggattgtgaagcttgtaaatatactcaaacagttccatatgtattaaaattctgaaaaatcacatagcaatgacattatcttttgatttttaatatccacttaatctcagtttaataaatctatccctttatattcaccagagttgaaaatatgtcaatgaggttggaagaaatcaatgaaagagaaacttttatgaaaacttccctgcagactgttgaccttcgacttgctcagctagaagaattatctaacagaatggtgaatgctcttgaaaatcttgcgggaatcgacaggtctgacctgatccaggcacggtcccgggcttcttctgaatgtgaggcaacgtatcttctccggcaaagcagcatcaatagcgctgatggctacagcttgtatcgatatcattttaacggagaagagttattatttgaggatacatctctctccacgtcaccagggacaggagtcaggaaaaaaacctgttccttccgtataaaggaagagaaggacgtgaaaacgcacctagtcccagaatgtcagaacagtcttcacctttcactgggcacaagcacatcagcaaccccagatggcagtcaccttgcagtagatgacttaaagaacgctgaagagtcaaaattaggtccagatattgggatttcaaaggaagatgatgaaagacagacagactctaaaaaagaagaaactatttccccaagtttaaataaaacagatgtgatacatggacaggacaaatcagatgttcaaaacactcagctaacagtggaaacgacaaatatagaaggcactatttcctatcccctggaagaaaccaaaattacacgctatttccccgatgaaacgatcaatgcttgtaaaacaatgaagtccagaagcttcgtctattcccggggaagaaagctggtcggtggggttaaccaggatgtagagtacagttcaatcacggaccagcaattgacgacggaatggcaatgccaagttcaaaagatcacgcgctctcatagcacagatattccttacattgtgtcggaagctgcagtgcaagctgagcataaagagcagtttgcagatatgcaagatgaacaccatgtcgctgaagcaattcctcgaatccctcgcttgtccctaaccattactgacagaaatgggatggaaaacttactgtctgtgaagccagatcaaactttgggattcccatctctcaggtcaaaaagtttacatggacatcctaggaatgtgaaatccattcagggaaagttagacagatctggacatgccagtagtgtaagcagcttagtaattgtgtctggaatgacagcagaagaaaaaaaggttaagaaagagaaagcttccacagaaactgaatgctagtctgttttgtttctttaatttttttttttaacagtcagaaccactaatgggtgtcatcttggccatctaaacatcatcaatttctaaaaacattttccttaaaaaattttggaaattcagacttgatttacaatttaatgcactaaaagtagtattttgttagcatatgttagtaggcttagttttttcagttgcagtagtatcaaatgaaagtgatgatactgtaacgaagataaattggctaatcagtatacaagattatacaatctctttattactgagggccaccaaatagcctaggaagtgccctcgagcactgaagtcaccattaggtcacttaagaagtaagcaactagctgggcacagtggctcatgcctgtaatcctagcactttgggaggccaaggcagaaagatagcttgagtccaggagtttgagaccagcctgggcaacatagtgataccccatctcttaaaaaaaaaaaaaaaa

SEQ ID NO: 50 - DNA, 51020 bp, Homo sapiens
gcgcggcgaagctgcggccgcgacttggcgaggtggtccctaacgttgccgctcggcatccttagaaccggccgcccctgacgccgcgcggggaccccagtcgcccgcgcgccccatgcgctcactcttcggtgcccggccgggccggcgcctcgcagacgcggagccgcgcgggtgacggcacaggcggctgcgcgcccagcccagcccagcccagcccgaggagagggcgcgccgcgcccccgccccccgcccgctctcccgaggccgtgggtgcggatgcgcggctgacgactcgcagcaagagcaccgccgccggccccagcccgcagcatggcagccgccgcctatgtggaccacttcgccgccgagtgcctcgtgtccatgtcgagccgcgcggtcgtgcacgggccgcgggaggggccggagtcccggcccgagggcgcggccgtggccgccacccccacgctgccccgcgtcgaggagcgccgcgacggtaaggacagcgcctcgctcttcgtggtggcgcggatcctagcggacctcaaccagcaagcgccggcgcccgccccggcggagcgcagggagggcgccgcggcccggaaggcgaggaccccctgccgcctgccgccgcccgcccccgagcccacctcccccggcgccgaaggcgcggcggccgcgccccccagcccggcgtggagcgagccggagcccgaggcggggctggagcccgagcgggagccggggcccgcggggagcggcgagcccggcctcagacaaagggtccggcggggccgaagtcgcgccgacctcgagtccccgcagaggaagcacaagtgccactacgcgggctgcgagaaagtttacgggaaatcttcgcacctcaaggcgcacctgagaactcacacaggtcagtggggcggcgcgggcgcccggatcgcgcggacggggtcggcgcgagctgcccgaccacgcccccggagtccccgatggggcgcgaggtgggggccgggcgggccggaacgcccggggcctcgccccttcccctgccgctccgacccgcggctggccccgcgcgtcgcgcgaggcgggtcttggctctcggagccggcgcccgccaggcgaccgcgcccccgccgggcacgccccctccccgggcgcgctcgggtggggccgcgggggcggatatagtcatctgggctgggggcggggacccctcccggccgggaggcggcgcgggcaggtgcgggcggcctgggtgtggaccgcaggcggcactcgtgacggtggggcgcccggagcgggggcaggggacgctctccggggtccctcctcgtttcctcccccgctgcccgggcgcgcgctcaggaggggaggggccggccccggcgcgcggcgggcgaagttcacgcagggacaaggtttccttcgccactcggcacattcttcgctctcttcttcctgtaatttttccagcgctctaaggtttaatttgtcgtaaccaaagtcagcggcggcgcttggcgatgcggggggcggtcccgggtcccgctccccgcctgcggctctttgtgggagcccccgcccatccggcccggcgggggcgcgcccggccctaggctcctcggcctcgaggctctctccggaaaggaatgccctggccgctgcccatcctccgtgctgccctctcgcctgcccacctctcacctgccctgggccggtgcggggcgggcggcacctgcaccagggcgggcgctgagcctccagcctggggatcaccgcccgcccccgccagcccagcggcaacagttcccacgcgcggcccgatactttgtagttgattcatctgtggcggttccctcccccctttttgtttcgtttttaacataaagatgaaaatattttaatggacggcaatccttccccattttggtgtaaagaattgtatgcttcctctgagctcacgtgagttcttctgtgacactcacctcttctaccttgggggcaggctcaaaacccgtctactgaatactgttgtcttgtgaccaagggtggtggtctctcatttgtaaaatagttcacatagtgattaaaaggcataaaaagaagctgcagccttggataccctagagctgaaggccccttttttttaccatttggaactgaaagggcccaaggtctgcaggtgaggctttcagatctcggactaactttccccagggaggcttttgtggccgctccaaaccacgtggcaggtgatggggtagagggtgagagcggggccatttctaggcattcggggtcagttaagggtgtgggggctcaggttgggggtgggagtcagtgtgggctcagagttcagctcgggacgcggctgcagggtgggtgtggccctgggggaggggccaggctaggctcagctcggctccaggtggatcctgagtatcgggtgggggcagcgattggggcgtggctggggttgagatccgctttgggggatgatgcccgtgctgggcaggatacttaatgtttgggaaatttttctacggcctctgtcagggtggcctgccactcggcagcaccggtagcggggaattgaggaggggggtggccgaggggaggggctcgccgtcgtgggcggggccggcttgtcagggcctcagccttgggatgtcttcctggtgggttcatctcccgcttcaggctctggccccgcgcgagcctcttgactagaatattggcgcaggggctctggagacccgggcctcccgctgtaggtggggccagtttcctcggagcgcctggaaaccgaaggcaggcaaaagagcacgggaccaaccctttgagtgtctgcagtgtgctacagtgctcgttcttgaagcagagaaactattccacccttcaggtgtgcagacatcagaagtcctacctccagggtggaagccggcctccaagttggaagtgcacagggctccggcagcggggtggcggggagttgggaagaatgcagatttccgggcccctgatgccgacctagtacacacagttccagcgtgcagttgggagtgcatgttaccggtaccccaggtgacccattatgagagttgaactgcccagaaacctgcctctggagggagtctggttcagcatctggtggagggcacccctgggaagcccatttccagccccttcccaggtgtgcagagcataagtaactggtgttcctcaagggagaagaggagcttgctgttgggggagaaaagagcatcttgcagaagggagaaacccaggcaggcctcagggatgactgagaaggcagggcacaaggtgatggctttgctgcagccgtgggctctgaggtgtccgtggtttgtgggcctctagcagcattgtggggtctctgcagtcagtgactgaggtcatgccgggccccgtactccattaggctcgggaaggtgcccccgccccacttcccgcatttccaggatccacagtaatttcatggcagagggtgaatatcacaaccaggaaggtggccagctgctctgtgctgttcctctatgtgaccagggaccggttcccagatctccctgcaacttggtgatgtctgccctgaccacctgcaaagtcttcagggacatgaggtcaagtatgtgaagaccctttgagaagtgcaagggtcagccttgactctggaggcacttgtggtcccttggccgtggctctgctctgattttccacccccactctctgaacagctgcatgctaagagctttctgtcctggttagctgtgtagcagtgtggtttcccactcccactcttccaggagttatcctgtggacacattggtctctgtcacatttaggtaattgttgatattataacaatgcgtaataacacaaaaccaagaaaaacatctttgcagctcgtgctactttattatttggccaattagaacttccgagtccagacctggaaagtttgctaagaggggcttaggggagcagcaagaccaggagcagattttcttggaacctgaggtgctttgatgcaggaattcaaggactcaccttcgataggtcaggctggggccctcttgagggcagactggttgcccagatcctgcctctggagagtcctgcgtgttgtcctgaatggggagacttggcaggcccccagcagaatggccacttggtctttcttggcagagagaccctgaatacatttctacctatttgttcccacagagaattgttttcaaaactgctctgtgccctgttttccctccagcgctggagtcaaaacatctctctgcatgctgggccctttctgggttctgggggtcccatggaaaggtgggcacagtggcgtgcccagccttccctcctgcagaacccgaggcatgtttgtggtcacctggccctgtttggggtggaggagggaagtagagtaagatcacattctgtcagccatttcctgtgataatttgggtggggttcacctgaaatttatctttacccactgaagcaaggatttgatcctgacagattattgcgacccctcccccagggcacactctggctttagagacttgtttccaagcacaccgccccttgggctccctgcaggtcctccctgatgctgctgcctgggaaagcagagcagagggcatctggcagagcagagggcatctgggtgggatctcctttacccagggcaaagccaggcttgttggtggcctgtgctttgttcagagacacacacaggccagtggctcagcacgcccacccctccctctcgtaccctcgctgtcccaggctgccagtggccctagttgtgaaactcctcaaacaatgcagaaatgtatgcagcatgggaggtgccagcctgcaccaccaccaaaccactgttaccccgcgttggtgtttttctttacagaccttctagatggatttgcacatatgcatatgtgtgtgtccacgtagacattttgaaacatacttaaataggatcctagcaagtatctcactgctggcattttgttccatgtgtttgcttaaatgaggcatcttcattctttttcacagccgcatggtattccaagatgtggttatatggctgcattgtaacttatttacccttcacttatggaaaggacagctacattgccttttttttgttttttctgctattacaagttgtgtagtagtggactctggtgtgtgtgtgtcttggtgcagaggagctggcatttctgtaggattgagacctagtggtggtattgacagggttgataagtgttggttaaatgtgttgtggagttactgtgttatgtttttcaaggaaagagaccacacttgttagtccccgctctgagggagagacctattgtgtcacgactccaccttcttgaaaatgtttccttctcccaattctccttttgcatgtgtgagaacattgagaacgtttaaaacagtaccagcaaaaccactgtcactcccgcacgcctggtggctggctctcttggccatcttcagttctggttttacagagattggaaagtgtgtggtgggcgctcagccctggagcagtaggatgggggctggtgtggcgccatctccactccccccttccccctcgctgaaagaaggctggaagctgtgctgcctgagcaaactgataggacgcagttcattaaaccagtagcctgtgtctggggcttcacatgtctggaacacagcagagatgggggcctgatccttctgagtaggtgccctgaagcccaattctcaagcttctgacagcctcctgcccttagatcctgtgtgctcccactttacacatagctttaatctgattggttactggggaagggcaaaagacatggatggcagctaaaggcaggggaagaaacaaaccagcaggttgttaacatatgcatgtgtaagtgtgtgtgtttaaatgggtcatgaagaagccctacagtcaaccagcactggaacaagcatggggccatttgtggagaggcacatgtttctccgcagcaatccctgaggtctgcatgagagaccctggaataatgaacactctagcagggatcttgagataccatggcactgtgaagtgtgttcagtttgtgctttcaggaagcaattaaaatagttttaaaaataaaaacttctagaatagtacactcaactttcacaatcctaagacttccagactgtttgctctaggggccaggcatcattctgtttgtgttagtttacatcaagctatctaatcttcacaaggaccctatgaagtaggctctattattaatactaaatttcaaataaggaagctaaggctccagtgctttaggaatcatgcccaaggtcacacagtaagtgagggtggaacagggattggagctggggcttgagcctgggcagccgcccccgaggtgggtgtacctgctgtgtcctactgccactcctgtctggaccagtgtttcaggtcactgcaggtgagcagggccctgtggtagtagaaatctggatgtccccagcacacggcttcccgcacagatttttgctgcttcttaaaggttgagggagtagtatagtgaacactcctatactcttcccatagggtcattgggtaatattttgccacatttttctcctttcctccttctctttttctttctaaagaaagaaaaattaattttttgtctatatttttctcccttttccatctcgcctctctctttaaatattatatattatctgatacgcagtccatattcagttcccctagtgattcctaaaatgtccagtataggattcaggatccagttaatcacacattgcatttggttgtcctctctagtttcccttagtttaggatagtttcccatcttttggtcctttattatgttacgctggcatttgaaggcccaaagccagttgtcttgtagaacaactcacaatgtggattggtctgattgtttcccgtgatcaggtctggtttaaacaaattttggtccaaaatatggcacaggtgatactgggcacttccatcgcctcatgggggggggagggcatgggatattagcctgtcctactgcaggatcacatggttaaggtgggcggccaggctcagccccttctgtccacctggttggtttctactccatcttccagcttccttgactggagagatgttgggggttgggttcagctttggaaggcttttgaagtcaaaggaccacctggaggaggcctaggtgctcctttccccaaacagacaagacaccctgattttcttttgaatgaaaatggctccagatggtattaatagccagctcaagggtaactgtgagtgtgttcttggtcagcccacctgaatgccggccctgtggccacaggcagcctgtctcctagggctggggagggcctacggcgggtgacactctctaagtcctggtgagtctttatgtgctttcaagaaataaacaaaaattgtcctaagtccacacacctgaacctgtttttcttttctttctttcttttttttttttgagacgaagtcttgctcttgtcccccaggctggagtgcaatggcacaatctcggctcactgcaacctccgcctcccgggttcaagtgattctcctgcctcagcctcccaagtagctgggattacaggcgcctgccaccgtgcccagctaatttttgtatttttagtagagacggggtttcaccatgttggccaggctggtttcgaactcctgacctcaggtgatctgcccacctcggcctcccaaagtgctgggattacaggcatgagccaccacacccgaccttttctttcctttcaaagccccaaatgggattattttcttgagaagtcaacttcctgtcgagatgggaataaacttttctccagcttggcaattcagaagcagccactgtgctgtgtggctgaggttggggtcatggagacagccaccagtgcagtcctcggggtgggagatactgagttcagaaggctttggacactcttctgggccaaaataacagaaactcgaacttgttttactcttggcatcaatcgggcactgggcacagaagaaatcctcacccaaccaaaagctctgccatttggccataaacacgtatgcctccatagccacgtacatgtgtagaaacacatatgggtgtgtgtgtgagtggacgtggcaccctgctcatgcttgctgaatgggggagcatccacacctggaacatagtggctatgtggaacttctgatttctagttcagttttagatcttaggtccgtcttcatccccagcaaatgttaccagctgtttgtgaggcaggcttttgggggagacatgaagtttgttcagttgaaactagggctgtggtgaaggggctatgccttcacaccctgctgccctgcccagcagagtgaccggctcctgtgtcctccacactgcttcagttcccctcctgatgcagggccaggctgtgatcgccatttgctgttgggcattgtgtgtgtgtgtatgtgtgtgtgtgtgtgtgtgtgtgtgtgtgtgtgtgtgtgtatggtggcggggcagggggcggggggagggcacagcatggcaccgagcaccagaaacacagccttgaccagtccctggtttttaccaacatctttctggacaaacaagacagcacacttggcagggggagtattctgtttattgttctccatttttgaagttcatcacacaaaaacacttgctaaccagaaacttggctgcactccgtggccattggccagtctgtcccaaggtgacttgtttggggaagcactgaagcttgatgtctcagattaaatgtccttatgctggtgccacaggggtgtggcctactctgcatggatgggtgaccctgggtccccaggcacagggcacaggctcgtctccttgaagctggagcccacgctgcatcatgaaagagctctgcaagaattgaaggcccagagcaaaaatcgcttaccaaagagcatgtggctcagagcctaccttggcctcctgtctcaggagaaacttctaaaggtggagttgtgtcacgtgcttgtctcctgtgagcacaggccaggtgggaggaagcttgggagtggggagaggatgacgtgggctcagaggagccacgagcttctcccccgaccccagcgtacactggacacacatgggaggtgaggtgatgcctgagcagcctggcgagtggtcagggccctgggtggggcctcctcattcccttttggagcactggcagctaatgcttgggggggccaccatcctttcccggtctggcctcgttgggggacacatctgtcttcctcctggagtaaggagagcctgtgaacaaagcagtgaccccaagacctatggccactggggatggcaggagccttgtgcttccatatgtgggtccaagctgtggatggggaggccaagtgtcctggcatgtgggaggtggtcaggtgctccctggagatctaacaggtatgcatgggttagcgagacctgagagtccttcttgggccacacctaagtatgtgcagggcctgtgatacagccagaatttcctcctctgataaacttctctgagcctttctacttgtctttaacccttttattgtctaaatgctcactaaacaagaaaaataatacagggaacttggtttaggggtattggtagaagttaaagttgatggcagagcatgaataggggtgtctgcaaggaattgttggaaaagagattggaaatagagcgaaggcgtatgtgagtctcagaacctgactcctttgttgactgggagtggggcagagggcatgggtccagcaggtcattggtctcgggttaccaaaaaggttaaggctattcacctgggccactggctggggtgctgctcaaagccaggatctgggagccggggtcagcaccttgggtgcacctgggcatcatagcaacaacaaaccccaacacattttcagggaccagggcggataaatgggagttaatgacatggttcccacacatccgaatctgggatatgtaaatgtgacacacagtctgagcatttggcaggctctccatggtcttgctttgcatagtttggcctatctgctctccagacttactgccccgttgtcctcacctgcatgactgtccatgtctggtttgtttactcgtcattgaaggcatccacaggggtgccatctgcccccatgtccctctcccactaggcatgctaagtggcctgcggcagggcaggcagggactcagattccctccatcccatcgctgaggtcttacttccttcttccgcccgccttacacgtggaaggtttctcctgtgcttgtccaccagttgttgtttttgtcttctagcacggatggtgtggcagaaggaggccttggacagcagcacgttaggacccacaggggctctggccccttgcagctgtgtgttctgagggaagatgcccaaggttttattatcttttccagagcgccctttttttctgcttgcatggcaggccctttctaaaattacagtcataggttgcttaatgacgggtgcgttctgagaagtgtgttgttaggcagtttcgtccttatgtgaacatcatagaatgcacttactatgcacacctaaatggcatagcctactgcacacctaggctgtatggtgtagcctcttgcttctaggctgcaagccggtacagtatagtactgtcctgaatactgtaggcaactgtaacacaatggtaagcattttgtatctaaatatagaaaaaggtacaattaaaatggggtgtcgtcttatgggaccagcctctcgtcccacgtggactgtcattgtttgaaacgtcattatgtggtgcatgactgtactttgctgcttggcctaaggtgccagggcattctctgggtaagcctgaggggctttgcaggataccatcttttatcaaggttgaaattagttttagcactttattctgtgtcccctttgcggctgacagagcaggagcctgtcagtgtctactgtcacaggtgtagagctgctgtgttggcgagcaggtaggtggttttcctgaattactgtcaggctttagagtcttacaggaaatacagccttggctacttatagcttgtgatttgaagtttccctaatgatgggctgggtagtacacttcagcagtttgctttggacaaattgtatcattcttaagttcactcactttagcctttgagaaatttcaaagtttgtttccctgatcttcctagttgccctggattatgagccaagcgtttgaattcctttgcacatctagcactgcacatggccttggaagatggacatttatgtgagtgtgtgcacgtgtatgtgtatgtgtgtgtgtatatatgcccgtatttgcagcatgtgtgtatgtgcttgtatatgcgcatgcacacgtggtcagccatgcagccaagtctcagaacaatcgttccactggaagtaacccagtcttgaggcatctggccaggtggtgcgggctgcagcacaatgtttgtttctcccagccctatgaaccccagtggggctgcatcacttaaaggccggtctctacaagagcagggtaggaagcagcagtgcgtgcccagccgtggctgtgtaggcagaaccagccttcaggatggagggtgggaccctggagccaagccagagggtgtgtacccttggtccctgatgaggtactccatcttgggccattctgccccctggtctctctgctcctcctctgcaaaccaggggggccagcagcctgctgggatcctggccctggccgggttaatggatgggaactgagctccttggctgccaagctgaggttcagtctggccccattctcacttcctctactcccccttgtactgtgggatctgagcatttctttaacagccttcaggggtttccagcccttaggacaagcagcaggtgggtatacaggggagcagaccccaggggggcctgaggagggagggtgaaggcaccccttctttgtgctgtctgtagctgctcatcctgggagacactgtgggggaggctgtggcttccttcttccgccctctggggatgccctggcggcctgtcccttgggtgttgggaggaggtggcttggctgactgtccctgctcatggtcagggtcctcctacacagcagaactggaggtaaacactgggttgccttggcaactgggctgtgccatggctccaagtgctcctggctagagaagttcccattgtctcaagtttctaggatgggtttctattttgatttttttttttttaaattagcaagaatgactaagataccaaaatgtctgacctggtttctataatttcttaataaacatttgtcttccctttataggaggaatgttttagtgattcattgacttttcttttagacggtggcaaggccctggtgaggcagtgcgggggcagcacagaggaccccccactgccgacagctggcacgggaggctgggagagcactggccacgatccagggaccaggcatgcttacgtagacaccacacgaggattttattggctttgaggctaattaagttccatggaaaattttggggagatgcctctcccctgtggggggttcagatacccacaactggtgcttccagaagctgtctgaaggctgatgcgtctgactgagcccgaggagcgccctcccacccagtgctgcactctcccgccagaggcctggccccctccctgcaggtcagggcatgtgcttgtttataccttgttggtgtttgctgttaaattctaactgctcacctaggtagcctgggctggctgcgcccagtggatgtcctcccgccccccgcctgctgtctcgtgggagtgccccaggtggcactttgctgtgggagatgcagcagcgggctctcgtgcaggcctgacccttcaccttggatttcactgggcttccctgctctgcccacccatggattatcttgtaaagagtcacctgccccatggaggagccaggtgaggatccagggaagtggctttgtttattttactgtcagtagggctgacccaggttgccctggtgggtggtgtgtcctgtgagcctctctgcctctaggcctgtttccagggtctcgtcttcgttgtaggcctgcaggtctatttgggtcccttctcacgactgaggcaggctgaggatgtacccagttgggctgggctgccttgtgggtcctctctccactgccctcatggccaacctcaggcgtgaacctgcctacaaagcctctctgtgcagcagcagctgtggcagttgccaagggagctcagcaccaaaaaagatgttcagatttgctgcatttgttttggaatgagtgcctggtgttgcttgtgcacaccccaagcctcctggcctttccaggtttccctgttgaacaggcagctctcctgcggttgggtggcacagggctgtggtgagggccccagcatccctcctcacctgggtgctcagttcctttcttgtcatcctttctctgtttgtaaagcagaaacagtcctgctaacatcacccccttcaaagatgtatgcagaatttgattttttttcctggaaaatatacttttttagtgtttaagaaaaaactcgtgctgggcatggtagctcatgcctgtaatcccagcactttgggaggctgaggcaggagaattgcttgagcccagaagttcgagaccagcttgggcaacatagtgagactccactgggcatggtggtgcacacacctgtaccagctgctcaggagcctgcaggcaggaggatcacttgagcccaggaggtggcagctgcagtgagccacgatcttgccactacactcaaacctgggcgacacggggagatcctatcttaaaaacaaaagaaaaaaatctcaagtcaaaggtattgaaatagtattggaaagtgttaaaggagtccaaaacatgagcacacttgggagtttcacgggagacccagcgcccctgtgccctgtgttcatcctgacaatttgggctctggacctggagccccgagacattgctgtgtctctcttattggatcgcctcatggaagcttgactccacaaatgttgtatttgcatgaccttccttgggaggctctcagtgttttatttttcatcagagaaaggccttcttgtctgttggttctttgttatctaaacagaggcactgtggtgtagtgatgaggagccctggcctcagagtgggacaggctgagcccatctctgggttttcactgtgaagtgggtctggtcatgctgcctctaggagcagaggggtagaatgtgggtgaggcacccagtaggaggggtgtgtgtgcgtgtgtgttcacgtgtgtgtacgtgtgtgtgtcgggtaagtggtgattaacttgcaagagcaaaatttcaccccctgcagtattgttcatgggtacctaaatgaacagacaggtttgctgtcttctcttttgaaaagaaacagacacatagacaattcagaatctttttttttttttttgaggctgggacaattcagaactttttttttttttttttgaggctgggtctcagtctgtcacccaggctggagtgcagtggtgcgatcatggctcaccacagcctcaaactcctgggctcacactatcttcacagctcagcctgccaaagtgctgggactccaggtgtgagccaccacacccagcccagaactactgttttaaagcaggtgctgggtcactttccaggatcctcacagcctgacctgagccccccttcccagagtcaccctgtgacacagcatgtggggtgatgctcctggcatcccagccccaggcgcatccagcctcagcttctgcgtctgtatcctcctggataaacccagactggctgcagaaaagtggtacagcctgtgagcttctgtgagcatcctgttgttgctatggagaccctgttgctagacatcaggcatgctcagactagggagtggtgaccctgtctcaggtgagcctcacgtgttaccaggtaaccaacccctctcaggtaccaacaggctgtacctggctagactctttaattagcagaagtagatgaactgaaacctcaacctcaaggtgaaagactcagtcaccagtcatcagaacagttctggacaagtccacctctctgaggtgggcttgaaagttgccctgcaccctgtgtcagtagtcttgggcagtcttacagggacaggagagattgtgcctgcaggtggccatgctagtcctgccgagtgaccccaccccaaggaaaggactttcggagaccaggcattctctgggtgagactccccacactgggcagtcttgggtgaggatgccggctgccctcccagggacgcagtgccctgctgggtgccccgccttccctcctgagacccaggcaccatgacaggtttcttaactgacagctctttagtagagaacagaaatcctgtttgcagcaaaacttgcctcactggatcgcttcataacagctccttcaagtggggcgagctcatcgctgcggtcggcatctcagccatcagcagcccggagaatcccactcaggacttaggtttgctatttttgtgtctcgcctgggcttcgctcgtttccacaggcattccacttcttgtttacaggagtaattgccttcatgagctttgggccatctgcggatatatgtatttttttctttattttctttcttttttggggcagcagttctatgtttgcaaatatgaggattgtttcctaaagggaagcatgaggccttcttgaggctggcctcttggctgctgagctgggccttcgcacccctttcctgctttatttccgtcttcctgtgagtgtattttgttgtatagaggcgcttcctgtggtcggaggtgaacatttggagtgactaaggagagcatggccttcctcgctctcccggcgtctgattgctccgtggacacttgtgcctgttccccaggcagggcctgcttgctggagggggtcggggccactcctggccatggagtttccgcatccccctgctggccaggctcctgtgcttggggagaggaggacgccgaggcacatactgtctccgtgctctgctcttgtggtcatgagtggcctcttctctcttctgctttgagtgactgggtgtagagtggcgcctgagctggggactgtcttgcacccttgcacagggcccgccggctcaggtgtgcagcagacaccatcctgggagaaacagcagcaaggtctggggtggccacatttgcatgttctgcagaggcagttgccttcgggatttcagacttgcccccagccgtaaggcgggatgcagtgcccacagacaaggctgggtgcacacagcctcccaaacagcatcctgcagtcttaagtctgcacacctcccaccaggtgtcggcccccagcagtgggaaggagaccagccttcaggctgctcacctgaagggagaaggcaaggaggcatgaggggtgcatccagcctccagtggggacccacaggtggcctgggtgctgatgggccctggcagagtctgtgtgcccacccatgccgtcagtctcctgaaccgcaggagcaagaactggatttcatgttaggagatgatttccaacttcaagaaatgacctggaaaagttttctacttaaactgcctgttgttgttaagagctggccagctctggctttccaacagcacgcacagccctcgggccaggctgagtcctgatgtggggatgtgcccactgactgcgggtcaccatgactccatggggaaggtctccttggagaggtctgaggctctggtgcacgaattaacctgctccttagtcttccctgggagacctcttgatctcctgtccccacccatacttctggtcacttgtcagtctttgtataatgtgttcagtgtccctccctctgagacggcagcagagacaggagagccacgcattgcaagtggcccatgcctggttgctgccctaaatacttgctgtgcacaaatggcctggctgtcaggggtgactttggccctgggggatgttttccaaccccctgggacaaacacctgccaatacttagcagctacctcctgctagcgctgcgcacccacaccaccctgagcctgtcactccagctccagaggtggggctctccccacacccatacccatctctgtgcagatgcagacatcccagatccacccctccagcctgtgtcaggaggggagtgggcacctaggctttcccctctttgtggcaggactggaggagtgtcagcagagtggcctccttcacctgccttttaagccagggcgtgctctgaaaacacgccatggctggacgttttcatgtgtctggctggcaagggctccaggggaggtggcaggggtgccaggaatccccagccacccagacatttgccaagcttggctcctcagtgccttggctggtggcctttgggggtgacttcaccctactgtcatggctggcccatggcgaaagggttcacctgctgcttaggagctgagactgggctgggccaggccaggggccctgtttctcttctggactgtgggggtttgggccagtggggagggagagcttccccaagggaccattacagaatttgctgtaagaatgtggagaaggagttctggtccttgggtttacagatttttattctaaacctaatggaacctttcttttaacaaaatctcctggaatccagtgcagaaaagagctgggaggattgctgggtggggcaggatgagggtgggaggggttttgactttgtcctgaggctgtgcgggatcctccctgggtcccccaaggaagccgcctgagtggggagggaggggccgcaagtaaccaggagcaggccaaggttccagggttcagcccaggacagccagtctaggtgcaagccaaccctgggggctggccagggagtgtgagctgttgcagtttggggcaggtgccttccaggctctgtgggtcagggttctctcctggcccttctgagggtgccaccctggcctccccgcctttgagcaggtgggggttgggtctgggttccatagggctgggcaggaggaggcagctgtgagatcccaggcagagccaggagaggagcaggacagatggcatgcaggcgtgctgcatcgggctgggattgtggggtgccagcagacaggggtggagtggggacttgggcattcctcactcattgcctgagtgtcatgaggggcctggctttggctggtgtttctgtcccttgagggcgtggtgtctgagggcagggcctgtggctccaccctgtgtgctgctctgggggcctggaggcctgtgcccccgcctcagcctgcctttgccctgctgcaccgctggcctgcctctttcccattcgggcacctgcctggagagcactggggtgcgggcagatcctgccttgagtgagcaccgcgtgcctagcagcaagcagcaggggatctccaggagcgtggcagggtcccatcctgaaactgacaggaaatctgtgagtatgagggtgggacggagaaagcccgggaggtgtaccgttcctttggcccccatccccctcaccaggggaccctgccctactcactgtcttccagtggccctacatgggcagcatcctgcctggctgttgtggttgtgaggccgcagcctgagactgaccacaccagggcttagtgtgcttagttctgacccgggtgtctgccctgccagcctggtgtaaagtcgtcagatgctgtgggccacacgaggtcatatttgcaccgtcagtttaccgggggcaaatgaccttctggggagggctgcaactgctccccacctctcacccctggttgtctctgtttcccggagggttccgtttgtaggcactgatgggggttctggttctagaggaagagtatctgagctcagagggagtgcagctccacaagtgtgcccctctgtgccggcatctggctcaggcatgcgtgagcccctctgtacagatgcctgcctcacgctgagatgcccacggcccaggcatatctctcaggagcccccgagaaccctgacgggaacccagagctgttccgcacagaacaccaggtcaatgatcttgactctgtttctgggaagattacccatctgtggcttccagaaagcacctcttcgtttttctgaaactcacagccttctcccccgacctcctgtcctctgcttttctctgaggccagaaggagagatttccacaccggccctttgccctggccacaggcctgagctcctgcatagcagctgctgtccttccccttctggactagtccactctaacctgaccctttggtaaagagtatgatggaccccccaccgctgttaccagtattcagccaccctggagctgcggccacccacacagctgtggaaagcccccaggccacagccaggcaggagctcctccccgggttctcttcttcctctgcaggagcttccaggccagagccccaaggcctcatgctgccccctgccccagctttctcaggacatgaggcgtcccctccttgcaggccccccaggctgacttctgtgtcacacagcagccttcacttccgtatctttctttctcttttaaaggcatcaccttcaactggaagaagaaatgaaaataccacctgtgcctcgaaatctttcagtttctagcgagggacatcccaggcacttggtggtggggccagggctcctgccggccataggtgggctattggcctgcaggccaggttcctgcctgccaccactctgcacccctctgtgctggcggcatcagggagggtctggggagatgcagactggacgtgtgggttgggtgggccagcaggggagaggggcagcgtagggtcctgagtctgggggcaggagcagactgtggtagcaagcatgggtgaggacctcagttcccctacctgctggctctcatcggggctgggacaaggtcaggtctgtgacagggcacgacaccgagcccagcaggtaggaggatttgaggacctgtgaagctagaaggtcaagcagggaattcaggatttggacaccctcctgggatcagcaggcgttcccccctccattgctctgctggtagcaccagccttcccagaaaaaggcttctttggcagggcctgggaacctcctggagggagctgggtgaccagcttctctgctgagccccactgggacagcacacctcaggaagaggccgtccttggtgctcgtggtggggaaggggagctgtgaacaaggcttccccctgaggcagggctggggatgggcagtggagactggaggcagggaagagctacccaggctttgccgcacgtgggtggcaagcccgctagaacctgtgtgtgctagcgtcaaagggcaccctcagggggctgggctggggaggggccccaccttgactgtggtgatgagagaggcaggatgtggggcccaggaggtgactctgccttggaggtgctgctcatgagggacgagggcatcctatggcaggccctaagccagcggagcctcagagtaggggagagaggcggggcagtgtgacttgggaagccaaggcaagaaatggctaaaggaaaagtgggtgtcacagtggctgggcccaaaggctcccatcctgccatcctgtggcagcagcttgagggggccccaacctcttctgtctgcccttccaccccctccagcctctggggccctggggcagcatataggctgcaggggttgggggctgcctctgttgtagtggctgcagcgctggtggaacaggaaggtgtgttgttggcttctcctggaccacaccccctgaaggtgacaccctcctaacacgaggaagagagctgcgcttctcagtgcgttccagatctcaggcttcagtgtctccagcctggccttcttggccactccacatgagtctgcctcagtgtggaggcttcttcctgcactttcaggggggtttatttctgaaggcggaaggcaggcctcgaaccccaggtgttcttgctggtggaggaaagtggaaaacacgcaggctttgtgggaagaaaggacgccactcctcctcccgtggattgcctgtggagctgggacaggcagcttgccactcttgtcaggatgactgtggaaggtgatgtctagaagagagagcaggagcacaggcgcccctcttcagcttggttttgcactaaagggacagcagaacccagagggcctggctctgtcagcccagcctccagtgccttccgaaaggaaaaaccacgcgtggtacgtaggcacacacgcacgccgcaccacatgctttttattgaagtatacgtgtgctacagaccatttaagtacagaaaagctaaaagaagaaattaagtggcacccacagttttacctcccagacaggactgttgcttggcctggttctcactgaaaagctgccagcatagagcccaggaagcccctcctggcagccaagggtgtgaccctgcagtcacggcagcctgcctgctctggccactgatgtccgcattttttagaccctggggtcctgactgcatctcaggccgcagtgccttgggctccagtggggtgtctcggtgctggcattgtagagtttaagcaccgccccagagctgtggtggaggctcagtgtgctgctgtaacagaaatactggagatgggtggcaaataaacaacaagtttattttcatagttctggaggctggaagtccaagattaaggcgctggcagattattctgtatctggtgaggaccctcttcctggttcgtagacagctgtcttcttactataatgtcacatagtagagggagcaaagggattttctggggtctcctttctaagggtactaatcccataaggagggccctacagcctcatgacattatcaccttccagaggccccaattcctaagaccatccatcaagctgggagttagggcttcagggtatgggttttcaggaggcacaaacattcagcctatagtgcccagcgttcttgcctaaccacggaaggcagatggcgaggtagggtggggtactgtatcctctgcaggcctactcccccaactcatggcagcttttttgccccttaactttgtagggccgaagcctgtgactgtcattccatctgggggaatcccaggacccagggcaatgctgctgctgcccatttagggaggggaggctgacactgctttccccatgagccgccacctgtgcagattatgacatgtttccccagagtgtgggatggaccaatgcccgctgggccacatgggaggcgggtgccctgtcaggcagtagtggtacagcagcgctgtcttcgatggaacagccaccatgccgaggacctggggatctggagggcacttgcctcgttctgcactgacccttaacatgagtctctgggacccagtctgctccagctggtgccagcctgtggttagtcagcttgcctctgatacttcactgccctggctgcatgagtgcaagggcagtgctgtgttcttagtgcctagcatgcagtggggaggaattaggctggtgtctgcaggagaagtcctccgggcccatgtgaggcgagtatgggccaagcctgtgcccctgtgcctgtgacccaggctgggagcagggggcttcaggtcctcaggctgctttaagcctgtttctcctgggcctggagggcttcctggggagggggttcacagcttccaggtcccctcctgccactttgaacttgggtgtgaattaatgaaaagcagatgagctcagatgtccctggaattccacatgaagttgaatggtataaagtaaccagccatgtgttcttggcggaaccaaaagtactcagagtgttgctgaagctgccaagtcctcagagtagcctagcctttgccgaatttgtgcttcatgggatgaatcccatttcatgagatgatgtgcttttctccattgagtgaagccctagagaaaatggcccctaaccctcggccattccagacatggagagtagtacagcatgcggcccctgcttttaagccaatatgcccattacagggcaggaagcagccagggtctgccgcagttatggtaggatattgggcatcctggacccacggatcctggacagaaggatgaagctttgggattggggagggaggggatgagccgagcaggccccccagcgtgcagggcacctggatgccgaccacattggtccgttgttcggaacctcgccttagctctcttctgccagggcctaatgagaacaatggtctctcagctgagcaggtggacacctgtgaacttcatctcattacagatctcaaaggagggagtctatgtggttctgggcaaggatgctccactttgcttccgtcttcaccaaactcttaaaatatgaagtgtaggaaattatgcccctgcagggttcaggataaaggaaatgacacccaagccttggttctttgtacctgttccatccactgggtatttagagaaagtagcttggcgtgtaaggtggtctctggcccaacttcacccccttttttggtgaagtctgggacttgcacaagcactggctctttggctcagctttcagaccttgaaggatccgcaaggaagctttggtctgggtacagcccttgagaagggccttagaggtggccatgccagtggagaaggtgaggctaagcaggctcttgaggtgcgcccatggccaggccagaatgcaggcctggcactcttcgcccaggcgccttctgggcagcagcagttttgagtaagtaaggagcctaatgtttaatggcctttgtgtaagaacatgatgatgacagcgagagcagggaggctgggagggagtgtgtggatggacatccgagtaagagttccccagtgtctccaggaaccacttgctttgtaaaatgacccaaatccaccatccctggacctggcgcagattctgagttgggccaaggcctgggaaacctgagttggaaagtcttttctcagcccgtatcatggacttgcttttggtgctctgggctggggtcagatttgtaagtgtgttcctgttgtaagaagttgccttgccaaaagatcatcatttgagtgcctggcatttgtttttatttctatttgtgaaagtcaagcatgttaattaaggatgatttgagaaacaggaaagtatcaaggaaaattaatgaagaggaaaatcaataactttaatcccaccactcacaagtcaccactgttaaaacgtgggatcattccatacaagtcattttctgttctacattttcctgctttaacatcctgttaggctcataaccccaaggcactgactggtttctaacctggtctgagtggttgccccgtgtgcgcttgtcttgcactgagagctccagtgattggctgtcctgggacagccgtccacctcattattttcagggggagttcccaggagcctgcaaaggaatgtgcattttcagggcaggttgcttcttttcagaaaggaaggatgagtgtgctacccgcaagcaaggcatgagagcgcccaggtatgcaccctggcagggagagtgggcgggtggctgttggatgtctaaaagggttttgcacaccgggcgcggtggctcatgcctataatcccagcactttgggaggctgaggtgggcagatcttgaggtcaggagttcaagactactggcctggccaacatggtgaaacactgtctctactaaaaatacaaaaattagctgggtgtggtggcggacgcctgtaatcccagctactgaggaggctgaggcagagaattgcttgaacccaggaggtggaggttgcagtgagctgagatcacgccactgcactccagcctgagcaacagagtgagactccgtgtcaaaaaaaaaaaagggaggcggggggagttttgcagtgaacagaagtcactgtttaagtagagtttacacacaacaacaaaaaaagggttttgcagtgaacaaaagtcactgttggagtttacacaacagaggggtcgccacgctgccccgtacctgggagcttcagactgttccgaataggcctcccctggacactgagatcttggaggctttgtgatccagccttggatgccgggtcctgagatcttgcagtccagggaaaggtgagattgtctcacagcagaggcttgcctgctgcaggccacgctcaggggtttctacctccctcagtcccagtgtctgccctacaggctcccttggtcccgctcagaatgcacagacctgaccgtaccagtgagaaaggacaggctgtgtgagctctgcctggcccaggtgtgggctggccacgggctccatgcctgccttctccatgggccatgacgtcggccagcagcctcagcagctgctgagattagcgtctgtatgtggtgccacttggtgtgcctctggctcctggccctgtgctggccccgtggaagggcctgtcagcatgtactctctcctggggacaggagcagtatcttcagggctgggtctaccaacccggtctgtgcatttccagcctcctgtgtgcttcccagctctgaattatgaccactgggctgatttatttcttctgacatttgcaagctgttaggtggcagagatcagtgaataaaaacttaataaaaggctgtatttaatcccatgcatcctaggctgagccaagttcccttaggattgagcatcaccagatagaacccagagcccactggcattgggacctccagggtggctacttggagtttttgtggggagggcagtttcttgaccgtggagcatgacgaggctggacccacctccccgtctgtatgcagccaccatgcagcccacctaggctgtgggctctgttgatgccgccttggagtgtgcggcttgctctgggtgggccttccaggggaggagggactgcagaggtagtgacagggaagggaccctgggccagggggctgggctcaagggtggctccacatctgactttgtggcctcatttcctggtctgtcacttagggagttttgctggggcctgttaaagggggagtgcctggaggtatcaaagcaggggcttgtggccctggtcatccagtagttactgggggtgtttacagccgcctgtgctgggcctcccctggagaggaagtcacgcccacgttaagtgcgtgggaaacctgtcccaggcgttctgtaaccgtagctgcaggtgctctgggtgttgcctcctggctgtagagggcccccttgtgaagaggggagccccaggttggggggcctgggctggcaaagtccctgccatctggcctgcccacttggggctggctgtgttgggcctggtcccaccagggcttgggctgcttccagatctgttttcattttcaattccctttattgctataaaaccacttcggggctgcagagaacaagctgttgtcctcagctgacctcagattcctggcctcaattgtttgcctcttgctaattttagcttctgatcatttccactcttatcctccccccaaagggagacacagaccaagaatagctgctgggaaggggggctgtggtggctgtggccagagttccaacagtgagctggcagggctgtggagtggctcgctgtggccaagcctggggcagggggctctcggcaggcaacccccacacccttcccctctctcaccgaggactctatactgcaggcatgggcctcagaggagaagaggacttcactgttccttcttttaaacagaaaccaggctgcttctggggaaaaagtacacccccacagccctgcctagcttgaagacccctgagagtccctaactcccctgagcccttcagactccaggacccaggttgtagtgtggggtcagacgtggcacttgactacagccaggccctggatacagcgtcagtgtggaggcctcaggcctatccaatccctacccagcttggccccagagcctggcacagctctgccctcccagtgagtgtcaggctgcagttgactgacagcaatgtccagtccaggacatcagcccaggcctgcaggatgggactttgcctgcctggggcagggagagaagcagctgaccaaaccccaaaccgtggtgtgctggtgagcaggcctggggagagccagaggagggatgggctgaaatccagcgaggaggaatggcctccaggcagggcctagggttgcaatccttgtccatatattaatagttttgtaatttttgtttttgtttttgagacagagttacactcctgttgcccaggctggagtgcaatggcgcgatctcagctcactgcaacctctgcctcccgcgttcaagcaattctcctgcctcagcctctcaagtagctgggattacaggcacccaccaccacacccagctaattttttgtatttttagtagagatggggtttcaccgaaatgttggccgggctggtcttgaactcttgacttcaagtgatctgcccaccttggcctcccaaagtgctgggattacaggcgtgagccactgcacctggtcatattaatagtttttaaacttctgtttggagaacttcagacagatgcccacatcttcaggacacccacattttcagcacctgctagccccctgcagtcttatctctgcccctcccccaccaccgtcctctccagttgttttgaaggaaatcccagatgcaatatcaatttgtccataaatatttcagtgccttacatcttcaaatgaaagcctgatacgtctaattttcatactgggctaacagtaagtgtgaagcaaaaaatccaaagcctgaagtcaccccacatgacttggtattgggaattgtgtggatccagccctaaaacccccgggcttggggttggagccaccatttaaagaagtgttggagcccatctcgccatccctcagcctcgagttataactagtcataggtaaaaagaaggcaaccaggacacaggtgtttatgagatcaaaagcaacaacaaccgaaacaatcaacagtgctactaaggtaacacagataggtgaggaagaggccaggtgctcagtaagtgtctcctgtggacggtccctcacctcccctgagcagaagggcagggtgtcatctccacatgccttggggagatggcagggccagcactctccaatggcttctgaagaggagctactaggagaagaaagtgatgctctaaggaaaggctggactgccgagagcagtatacccatcccattttgtaaattatgttaaaaattgtgttagagtagtgcatgtggtaatacacatagcttaaggatcctgtctttctgtacgttcattgtgataagcaggtcacccccaccatctgccagcttcttcagctactgcctttggtatttacctttcccagctcgataacgtgctcataggggctcttcttgatggtagaagagtgttaggcattatctcctgacttcccatgatggcacatgagcgcctgcaggcacccttctcccacccatgtgataattggatatttaggatggagccagcatgcggtattttgggggatcatgacagtaaatgctagttgcaggtgacccatacattacacgtgtttctttcccttagactcaatagttgccatttctgcttggttttcccagtgctgttgtccccacacccccagccccccatttgtccccacacacccagtgtggcctgctccgtgtggcctggataacatctctgtgggggttggctgtcatcctgggacccctcccctaccatccaggccccacttcctggagcccctgccatctgcttcttggcagagctcctgctgcatagcctcctggaaggggtgcactggaggccatttttcctttccttctgacttttattttagggttgggggtacatgtgcaggtttgttacatgggtaaattgcatgtcacggggtttgatgttcttatttcatcacccaggtgataaacatagtacccgataggtagtttttcagtctttcaccctcctccctccccgctcaagtaggacctggtgtctgctgttccctcttttgtgtccctgtgtactcagtgtgtagctcccacttataagtgagaactggccgggcgcggtggctcacacctataatcccagcactttgggaggccaaggtgaatggatcacctgaggtcaggagtttcagaccagcctgaccaacatggtgaaaccctgtctctactaaaatacaaaattagctgggcgtggtggcgggcgcctgtaatcccagctactcaggagactgaggcaggagactcgcttgaacccgggagacagaggtttcaatgagccaagatcgcgccactgcactccagcctgggcgacagagcgagactccgtctcaaaaaataagtgagaacatgcagtgtttggttttctgttcctgcgttaattcacttaggagaatgggaggccattgttttaaggcttatatgtctggaaatgtcttgatcctggtctgaggttgattcacgtttctctgggttgaatcataggtgggaatggtttactcgtgcggtttggagctctgatgttgctgtggagaagactgaagcttttctgattctggctgtgtgcacctcccggtctctttgcctctcagggccttttgggcttgtgcctttaccagggcttggaggtgtgcacgtgtgtggaggtgcttggccaagctctgtcctctgcagcgggcccgtcgggtggcatctggaaaacattcttgccactttcttcacgatcacctcacctcctgtgttctcagggctgcctgcagttccttttatttggagctgttggtctgatccttacattttcatattttttccctcttacccatccatttgtatttttgctctgttttctgtgaaattctctcagtgttctctcccaaccctgctattgggatttttatttctgccacatttttccttctgtatctttactttcagactcaggtttctaagcctttgctttcaaactcaggtttctaagcttcccttttaaaggcacatgcggttcttgtttccgccaggccgtctatgcggtgaggatgttagtgacagctctggaagtcttctcgttgcgtggcctctgctccctccacatcacctgtctctgctccttggtctgggtctcttgcccacccacgtcaggctcttctgcattgtctgctgatccttgatgtctggtgacacggcccagagagcctcgagctgcgtgggggcttctgggtgcccatcaggctcagcgacggtggcctcctgtgggtggtctactgggccatctccttccgggttttcccccaagaggagtgttctgctcctgcctgggggagggagggtggtcctgctgcacactgggagagaagctgggaggcagcactctgtgagtgggctgttccccacacccctgttctggaggctgccctactctgagctgggtctggagtcgtcagtccagagctccctcctgtgtagaccctcccagaaagtcagcctctggttcctggcaggtgcaggaagggcaagcagccatctgtaaggtgaggaaagaccttgtgtccacagctgctttatctgatgttcaggtgccccccaccaactgcacccccacccccgccagagactcccgagcctttgtggggaaacgtggattgcttccttgccttctctgctgtctttctaatttcttgcttccagattatttttgttactctctttcccttttgctttgtctgttaaaatccactttctttcattgtagtgggatctggggctggaagggtggtgggtgcctgtgcctgacctgccagctttatccagagttcctgttaggcctttggtccagtgcaggaggcgtggggagagatgagggtaaggtaagcactaggtagggggcggctgagagttgtccagctgttgggcagccagcatctcctttgttcttgcccaacaatgttatccaggagtttgccagagatacatccagcaatatcctggaagcaactgaaggcagctcacaagaagacagttgtgcagtggaaggagggggtccaaacctaaggttggcaggttgactatagtacagttgcgattgtctgcattcttacagtttctgtcaaaacatcgttttcccaagtggctggtcagctcccctgtggttaacatgcttgcagcaatggatgagagctccagttgctccaccagcatttagtattgtcagtgttttggattttaaccattctcataaatatgtatagtgatatctcgttgtaatttgaattttcataataacaaatgacactgaacaccttttcacacagttgtttaccatctctctatcttctttggtaagagtgttcagatcttttgttcattttttaaattggcatttgcttattgttgagattgagttctttatgtattttagatacaaattgcctttacttttgatcagcctcaaatgaagagcatttttatcagctaaataaacctggctctgtaattgtggattccaacctcatattcctgtcttgccttgtgtttcagaaaatatctgaagaggtgcataggaatgtcacccctgggctatcaccagccatcagggctgtgttggtacgcaagcagtcacattgcctcccgatgcccagaacaaggatgttaaccgcacactggctcctgaagccagggaacattcccttcaagatggcagaggaaaggcgggggcagtggggtcagctggacatgcgtcaccctaccgtgctcagggaagatgcttctggcttcccctgggaggcagctagtgatgagggtctcacaatggaaaggaaatggaaatgtctgttctttgggttcagctctcatgagtccacaggtagcaccgttcatctggagaaggccttcacttgcacaatccatgatctggaagcttctgtggcaaggggccgatatacgtctccctacttatccattgaggagcaataagggttgtgactcgggtgtgcgtgaaggagagaagctccagagcccttgtctcaggtggcttctggccttctgttggcagaaaccattggtattctattatttctgtttttaaaagggaccttgagaacggaaattttcaagtgtgttttgtaacccttagcaaaaggagagcaaacacctttatgaaattctggcatgtggtccttttaacctttccaggcagtgtactggttcatgcaaactagtgctattcccttcttagggattggggtgctgggttctgtggaagcagtcccagtggtgagctggagcttgggtgaaaggtacgtgtgtgtacatacaccactttgttacatagtgttattgcattaattctgactgtccaaagtgattcatttgatgaaggcagaaatgcagaaaggacagtcacacacaaatcccatcttcctgaggtaacctctgtttccttcctgcaattagagctctggcatatgcatttcatgtgtgcatttgagggtggggctcagccacttggtagtctgttttcttccctgtccacgttcccaggggctgtttatcagcagctcacattggtggttcagaagaacattcgagagagacagctgggctggctccgtgtgcttactctccctcgtctaccccatccaacagattgtgaagcctggttccagtaaccttggggatgacaccaaggagcgctgagccctccaccccgcatgttgtggtcttgggggagggaggcaggtaggacacagaacagggttcctgccccagtggctcctcccagctcttgctagccctcccttggcatcaggcagacctaggtagcctcaggtcttggagtcccgtacagagctgttgcagagggggtcactccaaccttgaagcttctgggggcctggccgtgggatagtgcagagtgtggcactgcttttcttcccggctggtgtccctggggtcagctgccttaaggttagggccctgttctaggttaggacagggaagggcttaggaaacagggccagcaggatacagggaggaaggtgtgggcacggacatgcagcgggcaggcctgtgccgggaagagggtgggctttgtctcctgagaagaggtggccccccagagcactggtctccccacatggcaggcagtggggctctgtttcaggccctctccaacgcacttaggctgcgacaagcctgagcaggatgtagggggctactagacctgcgggcagggctgagggacagggcccggggctgccaggtcacctgttctctgcaagagggtttttgaacacaagggctttcccaaagggtaggggtaacttgctcctagtgggcaagaccgagagcccctggtggctccatgggcctgggctgctgcaggagaggtctgggggctttctagctcctccctgggggtctggaggttcctagcagaagccccggcactgttcacctgtttcagaaaaaacagaccgttgtctaatttgttgttgttgttgttttgtctcggctccctcaaaaaccaaaggcgttttttaggcccgtcgtccaaattacaagctcattttaattcggatgtatttactttgtgaaaccaaccctgaagaatacattgtttcgttatattctgctggaaaccttgccacatttttcctgagaaaactgagcctgctgtgcacctggagccggccaggtggcaggtgctgggcctggaagaggagcctgccgaggctcctccagggcttctgagtgccattgttttgagtgcgctgcctggtagcgctgggcccttccagggaactgcctggctccttcctcagctgcagcctcctgctgcaggggagctggggaccgtggaggtcccccacaggtcctcaggcccacatgcccccagcctgggcaagcctgccgtgaaataggcctcgtagagcctggctgtgggggcagcaggggcccctgggtgcagagggtagcctcgccgcactgtgggtgggtgcccctgcttgctcctcctggaacgtgaacgtgggcagcagtgttcctgttccatgctggggaggggctgtgagaatgtctttcttcccggtgtagcctagcctcaggcccacccttctgggtgtgttaccttggtgaggtcacttggtttctcacctctgacaagggtttcacatcaacactttcctgtcttccgggttggtagagtcagatgagcccagtgcaggccaaaagtaaaagctgcacccctgtaaagagtgtacatgcagctgtttgtgccattgagtgtctgtagcagagcttagcagggtggggtccctgcaggcaaggtcccccccaggagacacagaaggagagggcagggggaggaaatgaaggctgggggaggggagacacaggaagaggaagtgggccacgatggttgccaaaggctctgcagacaggggcccctccctcagttgcctagagagccggctgggagcacgggcacctggggtgcagagctggggctggctgtgcaggtgcttgttcgtgtcaagaagcagttggacttctctgtgagattctgcagatctcccctgtgactgtcaaggctggtgccccccaccccccaccccagacgtcacagccagaggcaggcccaagaggcctttccatactgtgtccctttccctacccaccacgtgctctgccctctttcttccctccctccctccttccttttctcttggtgcaagagaaaaccctttcccagtagtccacagattccctggttcctactcctcatgagcccctacagtggcacttgggatctgcatcctagtggctggatggacttggctctcctagctgccatccacctgggctaattttcagcccacagtggtgtcacaaagtggtcttatggcaggagtgtggtattcaggagcctgaagggggcttctgacgtggaattacaactctggaactgcttctgtttaaatcctttgctgaatatttgtcacccatagccttttaggtctgacccgttctaaactgctgggcctatcaaacaatttatcagggagggcccttctccaataggacagtttgcagcgtgacccaggggctctaaagccctggagccctgccctgggaacatctcctacaaagctagattggactttattgctatttttgagtttctcatcctggaagccactgcccagcacattctgaggagaatctgcctgggcgaccattgttattttaagagagctcttggggtaatatgaggaactgtgctttgaaatagggaatacagaatggggccagtaatgtgcccagagtgttgaatgtctgatttttaaattggcattattgatggctagcattttctagtttgctatggattttttgttttgaatttaactttttgaataggaaatgcatttgtgtgttttagaatctaaaagatttaagtagtttccccagggaaaattctgtcaaccttccctgttctccatctgctcagtgttcccctgggtgatctctgttcctactttcctagggaccctctctctgcacatacaggccaaggcgcacgtagatccttgctggtcatctctcctcaaccttgttttcctcactcagcttggagatctttccatatcagtttgtaaagaactcattctacttctttgcgatagtgttctgttatatgtgcgttccataatttatttgacaggccccagtggaaggacatgagttgttttcaggttcctgctgcattgactaatcaggagcatatcccgttttgtaggtgtgcaaatgcgtttgtaggctaggatgtcaaaagttcagatgtgggtaaaagggtgtgcacatttctaattttaataggtattgccaaatcgccctccatggaggttgtagcagtttgtactcccatcagcaaagaatgcctgcttacctgcagcctcaccaaggtgataagctaccaagctgcatttcagtgtgtctcatctgccattagctcctgatggatgaggtggagcatcttttcatgcatttgagagccatttgtagttccttttttatgaatgggctttgcccatttttctgttggatatttttctttttaaaattcctgtgagctctttctgtattggagattagccgtttgtgataggagctgcaaatattttttctctcagttttgtcagttatctcttgcctttgtttatggtgactttgttcatggagaagtatagtatactgttttgtgcagtcaaatagattgattgattgattgagactgagtctcactctgtcacccaggctggagttcagtggtgtgatctcagctcactgcaacctctgcctcccacgctcaagtgattctcctgtctcagcctcctgagtagctgggattacaggcgctcgccaccacgcccggctgattttgtatttttagtagagacggggtttcaccatgttggccaggttggtcttgaactcctgacctcaggtgatcctcctgcctcagcctcccaaagtgctgggattacaggcatgagccaccatgcccagcctttagtcttttcttttatggtttgtggactttgattcatagaaggaacttctgtcttacagttttctcctagaatgtttgtggttttatttttcacattagaatctttgacccatttagaatttatcctggtgtagggtgggaagtatgaacccagcctttccagatgctaccgaagtgtcctcataacatgtattgactgctccctgccctaggggttcgagatgtcactctgtcctttgcacagttaccactacctttcgttctaattctgccatttctgctgggcttcactggccagtgatcagcttacgaaactgtgttgaatcctggtggtctcgtttcccccacgtcattgttttgcaggatttttttctggctattactgtgtgtttttctgtatgaatttttaggatcaagttatcctattcgaaaacaaagcaaagcaacaagaaaaatgcctactttaaaaaatatcttcgcaagcattgtagaaatgtggagccacacatttgcccaaggaggattctctcactgaagcagtgttgcctccgacactgtggcagtctccagccaggcttcagcaccctgccagctcttgcatgtgaagagtggatagtagtgtgtgatcagcggcactagaccagagcgcctgggacagggcacacctgccccccatgtctctttcactactgggcggctcacaaacatgcttcccggggccccttggcccataggtgataacattgttatctcctccaagcaccactgtgcagcaggcatgtgccccacgtattctcccacttaaccctcacagtgactgagaaacaggctggatgacaatccctgaggcatcaacaaaggagtggaggtagagcaggctgcttccttgccccaggcaggttccagctgcggctctagctctggcgccagccagctgaatgacagctcactctctcctcctgggcctcacttcccttacctgctcagtgggtgggtaagagcttccaacctggacttcctgcgaagccatgtgcatgtcagctccatgtggcttaataaaccactaacatttctagagacgagcaggacagtcaaatggcctcctaaggagttaggaagtccaccccccaccacagaggccaggcctttctgctacccctgaggctgtatgcctgagtttcattggaggccagcagttgatcagcccctgtgtttggccatgctgacctgctccagaacaggagggtgaacagtcttcctggagtgaaaaacattgcagtcttgaggttgggagctagaagtggccccaaaccagtgcccacagggcagagctgtccatcagtgaatgacagcccactcactggtggggaatacctggagactggggacagtggcctgggagcctgagggcaagcaatttctctttggaagcctctccctgtgcctccctttgagtctgaccagcgctgcccctgccattgcctccagatacacacccacatggacccttgcgctccagaggtctgttgtatccaagacatccctgtgagggtgatggctcatttgcctttccaggacctcccggtaggagttgcatttcttcccttctcccttccatgaaggggagctcagcgaggcttcctagagaagacccagcaggaggccggcagaagaggcccttgcggcagacgctgctctggccccagcttggtaccgggcattggaaacattgcaaaaatgaccactcaacaggcttcccacaggaggttcgcagacagaaagatctgcagtgtggtttatacaggtgcagctggagccgggtggggtgggggggcccactcacctgtggggggttgggggggagtttggctaaggctggattgcaggagataacttggagcgtgccctttgcgcaggagggcagagcagagtggagtccatgccacagcccgagtctgagctcaggctttgagctggagcacgcacactcctgagctggctgcatttgcatgtggctgctgtgggggagaggggagggcctgggacttgggtgttgaggcggattgggggctcagctgaaggagagagagcccctgcgccccccttccggctggctctctgagagaacacgttgtccccgcctgggcctgcggcttgggcaagagcagcatgtgggacgctgtgttcctgataagatgaggcaattgctctcactcggggcgctgctccgctcgcggcctcgctgtggcgccagggaacatttatgtaacgcgcagccctgagcagctgccccgcccaaccatactccaatccccacccaccccactctccccgcaactgcatgcggtcccctaccctgcatcacccggccatgcagcctggtacccgaagagtcccccctctgcttggcacctgtaggacccccaaaccccagcatggcttagcccctctcccagctccccacagttcccccaaccctcctacagcctcccttcagggctccagggcacctagtgcccctccaggcttgaccccagcccccttcctctcaccaagtcttctcacaaggcctaaccccgccttgtcccacggcccccaccccatgcacaggcacaggcacacatagccagaacccctggggccctcccacctggggagctggagtgactctgagatccggcaggaaggctaggagctcctctgcaggagtctggaatctcctactggttctcttgtcattttggagctagagggagctcctgtcctggtgagtccctgtcttgctgttgctgtctgtgtaccccatgcccgggtggaggcagatgcagggtttgagcccagcaaggagggtgcttggatttgtttaggccattgggctccctttgccttagaatgggaggcgggctcactccctgaagggccgggcctggctggcccctcacctcactgtgtgcccccctgtgctcactgtactcggctgcacgcagccccgcctggagtctgtccccataacagcagtttttagagtgaagcttgaggacactcgcaggtgcctcagacccttcagaggggccatgagatcaaaactgttttcataacaatagcactgtttgcctcattctcccaaaagagtacagtaggctattgcagatgctacaggatgtgtgacagcaccacgacgactggaatgcgtgcttgggttgaagaccttttttccattttaatttgtaatttctaatacgatgaaagcagtggctcccgcccacatacaggaaagctcctggggctccctgcggatcatgtgggtgaaagtggcctggggcatgttgctccctgttcccgcctccacccgttctcccttctctgggctgctccttgtcagcctcctgggtgctgcctgagtgtcactaccaggggacccagccagacccagtgttgctccttgctagcctgagccataactcctgttgtgggccagttcattggccgtcacctctctgcagcaggctgagggaggagcagagaatggagccgtgggggccgcgtctgcctgggtcaggaccatgtctctgggccaggcacccagtatgtgccctgtcaaagcataaagctcctgatatatagggaggccaagagctgtgctggtggagtggctgcacccaacacccaccttcctccactccaggctgcctggcaccaacgtcccatccattggatgctgcatttctctgcggccccaacaccatgtggtccacctgtagctctgtgtacctcacatgcttccccagcctgcaggcagaagaagctaaaggacaaggctcctcacaagggctattaggaagcaaggctgagtctgaatttgggttggcttccccccacaccaacaggcccaaatcagaggagacccagttgacagggctaatgactaagagcaacaataacagctgagatttcaggagtggacctttggaacgtgccaggcgctgtgctgaggccggtcgtgcgcagccccatgggatcactgtatggaccccccgcatgaggacggggcagtgtgctcacttcctgtggctgctgtcacacattaccgcaaactgggtggctgaaaagcaaccgaaacttactctctcacagttccagaaatcaaggtgttggcagggttaattccttccagaggctctgagggagaatccactccatacctccccttccttcccctgccccctttctcccccttctcacttgctgccttccccgtctccctcactcccctcccctcttctccatgctccacacttgggagctcatctccagatcctgacctgattacatctgcaaagaccctttttccagataagatcacatgcacaggttctggagggttatcacttggctatatcttttgggggaccattatctgccctactgctggcagcacggagctttttcgaggccatagcgtcacaactcagggcaaacagggtctgaacctcatctgtcagacctgacatggttaatgctaaaccatttaatgctggactttcccaagcttttaatgactagtgtgcgttgtgaatctccaagagtggaattatcatgcaacattttcactctttagttgacaaaattttttttctggaaacgataaacagttttatacaatgataacatttctttgaacatgttttgggaaatattggactagatatttaaggaactatatttaaacacttcttcttcttgttatggaagaaacaaatacataggatttttttaaaaggcccaagccaggcgtgtggctcatacctgtaatcccagcactttgggaggctgaggaagacagatcacttgaggtcaggagttcaagaccagcctagccaacatggtgaaactctgtctctactaaaaatataaaaactagccgagcgtgggtaggcgcctgtaatcccagctagtcgagaggctgaggcagaagaatcacttgaacctgggaggtggaggctgcagtgacagagcaagactctatctcagattagatagatagatagatagatagataggtagatagatagatacccataacacagaggagcttgcaacaaaaaaaatcctctcaccagtccagccccactccctagacagcaacacttcttttctgattttagttgtcttgatggttactgccataaatgaactgtattttactgctgtttcttgatttatcaaatttagatattttctgttatcctcctgccatgaaatttaaggatttacctgactcctatccctcccctccaactcttcctaaattgatggatgtattattttacttattttgttgactatctttgtaattttaaatctctgtgtttcatttagatacgttctttgcacactgtgtgcattccaacttttcccttaaatccatgttctctgctgggcccacaggtcagttgtatggcctttgtttataggattggttctgaaacattgacaactagtgctaaggttagcatgaccacaactgtgtaaagtttgcttccatcagcagggcctgtgctgggattacatttcctgccaccacctcatggagttgttgtgaagaataaataatagagcataggaaaaacccctagaaccgagcttggctcggagctcttgacccataatcatgaggcattttcgtttacatctaatttgaaccacaatttttttgtatgtcttttatttttcctggagtttctaattgcctcttttttcttttaaacaaagaagagtggtgtgtctttactgggtcctgaagtttacccagccttttgatggtactctctggtgcacaaaactcactttcctcctggaattttcccccgtgagtcttggtcctgtgctccagtgacctcccggggtctctgcctcactcttgtcatgcaatggccctttactattcagtcatgtctctagctccttggttttatctcattttagctggagtgtgtgagacattaacttggaaggccctgttcctttgtcttcaggatccagtgtgacttaggaaaagtctgatgtctatcccagccttgttcctttgtggatgacctggtgtttgtttcttccccctctctctattaagctgtgagagctcctgtttttactcagtgttctgacattgcagagcttctcgcagcagaggtcttaactcatttacctggtccacctctgtgcagcctgtctcatgttagtttcctgtctcctttttcttttttttttttttttttttttactctttgacagagactgttctattatttcttttgtaatttcttctccatgttttctgttttctcacttgattgtaattgtcgtgtatttgggaaatcgtggtggctacttgattttgaatccccccaacaccctttcccccaacatgtaaaatcaataaagagagcaagtgtacccacacacggcccctgcttcagcagtaccaggagacggaacatcgtgacatccacatattttccagaactgttttttggttctttttttctcatatatttgctttgagtatatttccagcttttatatgaaagttttatatgcacacaatgctgttttcaattcctaaatgctgttgtttttgctttttttttttgagacagacccttgctctcttgcccaggctggagtgcagtgacacaatcttgactcactgcaacctccacctcccaggttcaagtgattctcctgcttcagcctgccgagtagctgggattgcaggtgcacaccaccacacctggctaatttttgtatttttagtagagacggggtttcaccatgttggccaggctggtctcaaacccctgatctcaagtgatccacccgcctcagcctcccaaagtgctgagattataggcatgagccaccgcgcctggccgtttttgctctctgaacttctttgtatggtatcctctttgcttttgcatcaaatttcatctcaaattcctcagagaatactaatcagaaatttcaagttaaaattttcttctctttcctggcttcactcttttcctctagagttggtggttgcattgcgcttggcctttcttttccatgctgctggttctccctggctgtctggccatccctgggtatctgcttgtgtttaaggtgggtgggtgagtgggtttcctctgttgaacatgggtagaccagcttcagtgactggcagtcactttagggtctgtatgggggtgagaggggatgagaccgtgtaggaagggcagccctgcggccacccctaatacaagaagggctcgtttctggggtgccagagccccccaccctggttcttcctgagcagttgatgtcatttttgtgattcagagttttgtgtgttgagtttgcctgggtaaatgctggcctgtctcccgctccgagtgagggatgggaaggagggagcagcatcctgaccgtagccaaccttcattacctcccaccccactgtgttctgcctcctccctaccggcacaggcccctataatggggtgctctgggttgctgcccttgtctgtcaccacacttgggtctgcaagaggctgtttcattctcctgctctgccagccgtccctggttggtcactttgggacttttgtgagagaaggagcagcagactggttgtagaattccaggccccggaactcacctacgctgaccctctcatgtgacagactagactgaggagggtcagaatgggaattgccttcctgccctgcaggggtgcagagtgtggctcccatggagcagcatgggcggctggactccgggaggcctgtgaagccagggcatgggcctgcaacccccaggcgttggagaccactggcccggcatgggtgtgtagtgcagcctgctttgtggtgtacttagggggtccactgccaggagcctggggccctgacctgtacctacccatgggccctgcagcttcagcacctgaaatgctgttttatcctaggccgtgtcctctgcctccatcccaggcgtgggcgggagggcaggggcccaccttcatctctgccttgatggatttgtcacagaagctcttggaggtggggcatgtgggaggggtgttgagagaccagggtgttgggtgttgcgggcccttccccagagagggtgtgaaggcggggccaggtgcggatactgatgctctgcccctgtgcccacaggtgagaggcccttcgcctgcagctggcaggactgcaacaagaagttcgcgcgctccgacgagctggcgcggcactaccgcacacacacgggcgagaagaagttcagctgccccatctgcgagaagcgcttcatgcgcagcgaccacctgaccaagcacgcgcgccgccacgccaacttccacccgggaatgctgcagcggcgcggcgggggctcgcggaccggctccctcagcgactacagccgctccgacgccagcagccccaccatcagcccggccagctcgccctgagcccgccacagccatgagcagccgctcccaccccctcgtgagtccctggcctttccttttgtaataagaaagaagagagagaacttgatgcaaagtccacgaaaaaacaatttttttcacctcaggtgtcaaagtaaatttgttaaaaaaacaaaaaaaacacaaaaatttcaaaaaacaccacccaccaaattgcacaatagatacacccacaaagttgagattcagcgttgttgaaccccctttctcagggatggacacgtttcacgaggtcagtgaggacaccccttcctgccgccttactctgtacatagatttgcactctggagttttctgttaggttcgggaacacgctggggacagagcaggccagccagtctggtggagctcagcgtctggctggctggccagcctgtgggtctgttgggagcagatgtgctcactgacgtttgtgcctccagggcagattcctaagcagctggcctgacctcttcctgcccagcccccaacccagtctctggcctctgcccaacgagcctggctgggcttgcaacgcagctgattctgagacaggcccctgcagagggatgccttaaagctgtccctggctggaggagcactccaccttggggatagtggagggggccttcagccctctgcaccctgcctgcctcacaccccgccttcaggagccctctcctacggcgctagggagcactggaagcagagatgccagccctggctgagcgtagcactgcaccgtccgacctccgaggcaggggccggggtcacacctgccaggactccgcttctccgtgtcccagcagaaggcatgcaggaccctgtcactactatacctgggcctctgatggggaattctggtcttctaaaaagatgttagaaattcctggtggcacatccagttccgagtttgcccgcacgggcacttttgttggaaacagtgggcaggtcatggggcctcctcatcagagggtctgtgtgagcggctgtgcatgtggcagcgcaccatgcttcacagagaccattctgtagcaagagaccggaacattgtgacttggaccttttcaggagtggcgcggatgttacaggaaatgctgtcggagagcgcgcattctatttcctccgcagggaatgccagatagaaagttgcgggcaacacttttctcagacccaccatgtccccaactcagacttagcaaacctccagcctctccgtttcccctggactcctcctcccttttcctcctgcttctccttgtcctgcctggaggctccaggccacacccagctggtggggctgctccagtgccccatcaccggccttctcctggcaggagaggaggagcagagagctgggtcctgggctgggattcgagccctgggcgggggtcagtcaagccgtggtccagcaaactcctctgcagatggctggagtgttgacccaggcttgtggcccaggtatcaccttcccttcctcctgagagttgaggcctgtaaatacaagggcccaggacagagtgtgtgcgtgcgtgtgggtgtgtgcgcgcgtgagcacacacgcgtgtgttggggggggtggggggattggggtggactcagggtatcttgccagagatacctgttttgatgagtacctattttgatgcaaaggaacggccctgggacctcagagggccacagatgggcttcctgggcctagcgtgccttggttgtggccatcctgcttctactcagccctgccatgctatggggtgcagcacaaacccaggacccaggcctagccactgcccacagctgatggtcactgttttggctggctccagagtggacaggtacgctctgtccacagcagctgctcaggcacagtatgccgtcaggtgcccgcttcttaccactgtgtgtcagctgggattggccgacagcgtggtggtgacttctaggtagaccgatggaccctaaattgggcagtggcattgtttctgctgtggtgggaactggcagggagagggtcacctccactctggttggatgcggagctggtccctctggctgccatgctgtgttggggctctctgacctccctgcttgcattgggtctgggagagagagtggaatatttggtagggaccttgacagaagagagccctgggtgcttgtggtgcaaagatcttcatgcccagttccaaagtgaggtccctcccaaagttgttttcgtgtgaggcagagaaagccacactctgaatacattttatgtctcaggaattcacattccaggttcaggaattttattccaaagtcctttggtgcactcaccgtccaccgttccccaaggcagggagagggagtggcccgtccctgggaggctggcaaagtgctctccagggaggggtcagacgtccttgtgatctgcccagggtgtcacggaaggagattttctagctccacatctgtctgcacataggaaggaaaagataggactctaaacctagtcatcttggaataaaaagaagagctggtttgttttagagcagggcggggggtgggggagggaagcgggtgttggctgtttccaaagagagcacttaatttaatttttcctttaaatgacccagggctgttccgtctgatagatggaagggtaacattgccttaaaacagaaatatgcaggcgttggctatttttggcataagagcgtgtcttcattcccaaagtggttctcgtttaatggcagggtgcggtccttaggccccggcctggactgggaaatgggggtagggcaccaggagagaaatcctcctgggtactcctggccagaccctcctgaatcatctgcggcttaaactcatctcgcttgaagggcagggagaaacccatgaatctcaggcacggttcacaggggtcctcaagggcaggtttccatttcatcatgaagtgagggactcctgtggaagagggtggtgggccttggaacgctgcctccactgaggcgggcacacaaggcggaccctcctgaaacagcctccattttcttcaaacatgcagaatgttttcccagactgcgtctatttcagggtcttccatttttgtggtttatggccatgcttgccagttttggtggggttgaggaacccataggactcatagaaataatagtgaaaactcaaacccttattttgggacttcagttctcgtggtccataggggcagagatgtcaaagtgaaggttgcctgagtgaagggagagttcccctataaaaggcctaaaattgatctggggctcagccatcaaggggctggtgttgctcctgtcccagacaaggaagcccctctttacatcagccatattaggggaacggttgtcagctccccaaatgcctactggatcctacagccatacaggaaaacagacggacacagccctttccttaaagagccctggggtcctgtcctgcaggatgctgcataggaatgggcagagatgtcctggatgggaacatggtcctggaggtgccctacctgcatcctgctgcacccccacccacgacactcgagtgcaagatcgcctcactcctaaccctgactttattcccaggccccacaccgaggcaggtgcaggattcgccatggtgcagcctccgggtacaaacatctgaggcactggcgatcccagtccttgcagcaccctgaacacagctcagaccagtgaggggtgattcagaggtggggatgggcagagagggctggccactctgcctcaggacttgacctcaagtgttctgtctccccacccggtgtgtccagaagaccagcctctttcttgccagaagcaggtgctaagatggactgcacagggtcccggcactccctcgggacccattcaggatctcagctgggcaggggtgccacccaacaggaagatgtgatctgagcaatagtgtggccttgtttctccgcttctggttgtggctgtgtgtacagggctacctattttgacttctgacaggtgtcactgattttctttcccccatttaaaaaaggtcatttagtcaaagacacagtgctagaggtttaaagggtgtaatgtgttggtcacatcacaaccagtaagaaacgcttggtaggttatccacatcttttgctgactgtttccatatacaattctggtcaccatattttccaaagctaaaatctgaggcgtgggctgatggtttttgaaatcaggattaccccaggaagaaccaggtcctattactaattttcctgattctgaggctctgaaggcttgtctgagacacattccggagacctttgtaccagaacttggatgcatagtccaccttactactgatacacgcctgagcaccctttagggcgaggcgccgcctcctgcctgctgtcctgtccctcagcatcagaagagttgaattcagcaggagacgggagcccggtgtccatgagggaagaggggtcgcgcttggtttctactgacccccatgaagatttcagacttgcagtgcggccacctggccctgccctgcctctctctttctcatacagctttaaaactttactacttttatttaaaaatgaactggatgggagagaagtagcgtcccctaccctacaagtcacacattccggggaggggggtggggggtggaggcaggaagtcatgggggtgggggtgggagcacgggaacagctttcttaaggcctcagggtcctgttttccctggcctcttctagagggcccgtggacaggtcgcagtgcgtgcttatttggaaaccaggtgtgtgagccgaatgcctgccaggccatgcactcagcagaggagcccttgtacctggctgccctgagaggagcaagaggccacctcccatgtggctctagacaccacgtgggctcattagccccagcgtctgtgccggctccaggtgcctgcctctgggtgtgtgagtgggagactttgctccctggcctcatcctagagaggcccctggtgcctagtgctgaggcctctggggctggaaagcctcagcagaaaggaggcactactgagcaactatgcattgtcattgtcgggtttggggctttcggtggttccttggtgactgggaattgcttgtgtgcatgtgttgggtgcatgcttccgggtctcagctgccccaggcccgcacaggcaaccccttcccatccaaagccattggtggagcttctctggaatcatttgccaaaagcccaaggcagaatccaagggtccaagaccatttccatggagctcatgtttttcttttctgtaggaacttttttttaaccagcacccaccataattccgaaggccacgtttcatctttcctggatcactacagtgaagtattacagttgtacagttcccagtctggccttggcttgctcggataaaactttgtatgtattttgtatggcatagattctatattgtaatgatgtcctatgcaaaaagaaaaattaacgaaattgtaaattttattgttttaacgtgtatgcatgtttagtgacgtttacattttgaaataaaatttatgattcattatttta

SEQ ID NO: 51 - DNA, 172214 bp, Homo sapiens
gttctctcgctcaggtctctgcatgtagttgtcacttgcagctccatttccatcacgtggtaaaatgccctttctcttctttcctgcagatggatggtttctagtgtgcttccaaaccccacctcggctgagtgttgggcagcacttctacatgatcctatgactcttgatatggacgcagtcctgtcagactttgttcggtccacgggggcagaacctggtctggccagagacctgctggaaggtaagcccacctccttgttccccacaccaccattctgggcataaccaccttccaaataagaagatttccaatacctgatgacagtggtacttgagcactaagtgggctttgctttgtgttacatcttaccgatattaagtcaaaattttatcactaattattatatttaagaaaatatgttcaatggagcagaaattataaaacattcaagaaaatacttttgtggtaggccttagtttcatatctctgtgttagcggagacgaaaatactctaggccagggtttttggtggaaaaagcacctactatccaggaaagccactgggagtaattcacaagcaagaagacagccttcatcctccagcttttcacgtagataccatttgctgcatgagaaattgcatcctccgtatgtatgatgttttcagatatgtattcagccataaccatagtgaactaaaatgaaagtgtagtttctatgtctctaaaatggatttacctttcttttttttttctgatggcggcagtggtatgtaaaggtgggagggaccagttacaacttctcaggacagtcagctgtgtgagaggagagaactttgtaatgtttactctttacttcaaatgtataaactgcaatttgtggagttagtaaatacttggtcaagaattgtaagtcacaatgattctttaagtcacttagggaaaataagaattattgtacatttgcagaagtggagagaactattcaatcatattgaaaattaagaaccacctactggaggattatcaaaaaatggcaatggcaaaagcatagtttttaaattttccccaacctattagaatttcaaaccaactccaagtttagaataaaatatgctgagagtttttgcaatctatggaaatcaaaatatgattctcccttcctgctatttatattatataatgtctccctgtcagtttccattattttcattaagtgggcagcagagtggagaagcaggcttggaataaggtcggcagtgaaatccgagtttgagttcagattcagccacttatcaactatgagatataggacaaattattttacttcccttaccctgagatttcttctatgttgagcttaacccaccttacaaggtgactgtgaatattagaagttgtgatataaaatgtgtggtaaagaagcagcatgtagcagatgctcaaaaaagtatagaagaccatgcttgtggtggccattattgtaattagtactaacatcagtattaatgtctagacagccttataggaagcaagagttgtcatctcttttctttattttttttacttatatttttcacattaagatacagaaaaattgagttttttgtgtctagttctatgaactttaacacatgtatggatttgtgttattactaccacattcaggacacagaagcacttcatcccctccagattctctgtcctgatgtcttttataatcagaccctcccctaccccaaccactggcagtcagtgctctgttttctatcactagttttgtctctttgcaagaatgtcagataaatgtcctacagagcctaatcttctgaaactggctccttttcatgcagggagatcattttgagactcatcaagtcatgtgtcagtagccggttcctttttgttgctgagtagtattccattctgcaggtactccagaatttctccactcatctgtccaggggcatttcagttgttttccatttttggcagttacaactagagcttctagaaacatttaagaacaggattttgtgaatatagttttaatttttctttgttttttcttttttttttttggtgacacagagtctcactctagcccaggctggagtgcagtggcgctatctcggctcattgcaacctccgcctcctgggtcccagttcaagcaattttcctgcctcagcctcctgagtagctgtgattacagccgcgcatcaccatgcccagctaatttttgtatttttagtagagacgggatttcaacatattggccaggctggtcttgagctcctgacctcgtgatctgcccgcctcagcctcccaaagggctgggattataggtgtgagccactgtgcctggcctagttttaatttttctaggctaaatacatgttaaccttgtaagaaactgccaacctgttttccagagttctgtaccactttgcattcctaccagcagtgcctgagagctccagctgccccacatccttgtcaacacttggtatttcttccttttttgttttttcattttaaccatttgatagctgtgtgatggtatttcttcatggttttaattttcattttcctaataattaatgacgttgaaaattttcatgctgtttattttccatctttttattctctttcgtgaaatgtctgttcaggctttttgcctatgtctaaattgagttgtttgattgagttttaagagttctttacatattctgaatataaatcttttgttcagatttgtgatttgtgaatatcttctcccaatctgtgcttgacttttcagtctcttaacagggccttttacagggcacagttttaaattctgatgcgttccaactgacttttttctgaggatcatgctttgagtgacatatctgagaaattttgcataactccaggtcatgaagattttcttgtagttggtcttttaaaagttttatactttcatgttttacatttagatctatgatccatttgagatgatttttgtataatatgtgagatttaggtccagattcagttttatgcatacggatatccaattgtttcaacatcatttatagaaaatatcctccttctttcattgaaattgaattgcctttgcaatttgacgaaaagccaactgagggtatttgtaaggaatatatttctggacagtggttctgttccattgatcattatgtctgttcttttatcaacattgtgccatattgatttctgtagctttgtaatgagtcttaaaatcagatagtgtgatttttctaaatttattcttctttttcaggagtgtttcagctattctttttttttttttttttgcctttctatgtgaactttaggatctgcttacctctatctactctaaactgttttgctgagattttgtctacaattttagtaaatctacaactcaatcctatgttatgtctttcagtccatgaaggagtgccataatttccatttgcttgggcctccattaagttctttcgtcaacattttatggtttttggcatgtagatcctatacatgttttgttctatgtgtattggggggcggggttgtaaactattgtacatggtattttttatttcagtttctacttgttcattggcaatatacagaaatataactgatttttgtgtgttgatcttgcatcctgcaatcttgctaaagctaaactcagtttgttctaggagggctgtgtgtgtgtgtgtgtgtgtgtgtgtgtgtgtgtgtgtgtgtgtgttccttgggattttctacataggtgatcatgttatctgtgagtaaggacagttttatttcttcctttccagtctctaggcctttctggttttcttgtcttatttcactgacgaagactattcaaaaggttaaatagtggtgttaaaaaagaagatccttgtgttgttcttaatctctgagaacaagcagtatttcaccattaagtagaatgttggctataggttttagtagatggtctttatcaggtgaagaaaatttctttctattccaagtttgctgagcgttttataataaatagatactgaatttttaaaatgaagatcaagtgggttttttgctttaaactgttgctatactagattaaactgattgccttctagtggtaaaccagactttcagctatttctttccatgtttctatgttctgccctttttttctttccttctgggactcagatgataggaagctcggcccttttgttattacctaaggtctctatggttctgttcaaggttttcaagctttgtctgttattcagattcagtcatttctattaatttatttatgaactgactgactacttcctccatcatcttcatcccagtagtgagcccagccagtgtgttttctatttttgtagttgatttttttcatttctaatatttccacttagttcttcttcatatcttccatttctttgcaaaattttctatatgttttaagagtaccctcctttacttgtacaatatttttaacaactgcttgaaaatctttgtcaaataattccagtatctgtttcatctcagagtagctgttggctttttgtatgctgagtatggtttcagtatgctgaattgtatcctagacattttaaatactatgttttgagattctggttattgttaaaatcttacagtgaacattattaactttattttagaagataatcaccccaaatgggttcagaccacaaattccaagttcctgcaagacttgtgtggattgtggttgctgtgagtctgtgagatgtggatctgtctggcacaagcgccacctagtggccagcctgggactctggtggtaatctatcccacatttcagcactcaaagtctgtgtggtccgtgtagggtcggatccatacatgtagagctcaagggtaagcccaagagttcatgagcaactttcaggggttgctctcccgaagcccttcctcattgtaacctgcccagtagtgtctgggtccctgggctctaccttttcagccctccagccagcttgggtggttgaggcttgatttaccctactctctggtgcacttgactgaaccacgtcagagctaagcagcgagaagccagagagaaaaagcatgaaggtttccccaccctctggggacctcagactctctggttggaaaggaagtttgcctggcctgatgactttaattatctgccatttctcactagggccacaaaatttcttgaggtctggggcacagagaagaaaaaattttagaagaaaaagaaaaaaaaaaaggataaattagagatttccagactttcttagaacggtagagacccctttcctgcttctgtacccgagttggctgggcttttcctggaattagtgcccactctgggttaggagctgcattgactccacactggggagactggaggaagggaagtgtctcgctcacctccaactctgtggcacttccaactgtggtctcctttctgcatcagcacctccaactgtgatccaccttcctgagcccggtcgctgctgcctgcacgctgtccaggggtcccggctgcacccagtgggacagagggtggcagtggtgagtgctcactcacctcacccactgctgggtcctgcctttggctttcacaggtaagaggactgtggttccattgtgtatgatggattatttaaggtgtcaaagttatttgggtgaagatttctctaaacccagtgtttcaaagaatgaaatatttttgttgtaagtcctcagaaagatgtgtattgggaggatgtcagtaatgtaggaatttagaggggagatgtctaaagggaaataaatcctcatggtggcaaaagctgagcggaaggtacatggtcctcatttgtaacttcttgtatttttatttatttcaaaaaaaaagttaaaaaaacactgcaatgatgggaatcacagtacagcagagggaggccaataagagaaaggaggagcagaggctgatcacaaccttggtaaactgaggcaagtgaacactgacctgcctccaaacagaagagggtggccttgcctgttcacctgcttcctgtgttaccagatcaaagttgggtctggctctctggcacagcaaagccaaaaactggcgtcaagactgcagtaagagaaagtgagacatttatttcagggcaggaagccaggagaattgggcagctcatgtttaagccctgaatcccccagtgccatataggtaagcgtttttacaggcaggaagaggctgggcgtggtggctcatgcctgtaatcctagcactttgggaggcctaggctggtggatcacctgaggtcaggagttcgagaccagcctggctaacatggtgaaaccctgtctctcctacaaatacaaaaattagctgggtgtggtggcatacacctgtaatcccagctactcagaaggctgaggcaggagaatcgcttaaacccaggaggcggaggttgtagtgagctgagatcgcaccattacactccagcctggagacagagcgagactccatcttgaaaacataataataataaaataaaggcagggggcagaagttacaggcaaagatataaatcaatacacggaggctgtacattggtttgacctaaaaagacaggacatcttgaaccagatgtggggtggagggcataggtcataggtagatttgaagattttctgatttacaatgggttaaggagacgaagctttgtctgcaaatttgtgatcaggagaaaagaacgttagctctggtctctgggcatgacttcctccaggcccctcaggaagaaatttagaacaaagagtggtggtccaagctcagtcctcagtttcccctgtctgaggtctgcatgccagcagatagcacttttcatttgttggtgtcctggtttctggaaatcagctcaaggacttgtgttaaaatgttatctttagtctctgtgggaactttgatctattctgtgacttaaacttccctggctattgttttaagttattcttcccttcttgcttcagttgctcatttacttcccagtgctggctaggtacctggaaatgcctttgaaggaactcaagatttccttttatttccatgcttgggggcaggtgcccggcaggcccctaagaggggtctctgctccatctcatcttcatatcagtcccttgcatgtccctgaagtggttctcccaaacaaattcaagtcaggtaactccatttcctccaatttttcatactccgtccccattacctgcaaaataaacttctccacctggtactccagcccttcagcatctagtcctattccgtccctcccctcattacctgaggcatctcttcaccatccctttccctgacttgacacccacctctgtgcttctgcctccgcccattgctcctgctgctcctccccctgcacacactgcctccctgttgaaattcagctctccctccacgatggatcatgaactccccgacagcaaggaccatacaaggttttgttcactgtttgcccaacacccagcacgtatgagtccctcagtagagtgatctattaatagctgctgaggtgcagtgatgagcagccagacagaaattgcccacatggagacagatggaaataagttatatagtgtgttagccattagtgctgtggagataactaagtcggggagaaggaagcaggtatgagtgtgtacagttttaaattagggttgtcaaggaaggcttcacttaaaaaaaataggatctgagcaaagatttgaggaagtgagaaagcaagccacgtggatgtctggaggaagaagtttctatgacgaggtaaggattcactgataattccttgccctcctgtggaactttgtggacttctgctgcagcttgtgtttggttgtgccttattttataattcatcacatgcttatcaagctggatttgcccagtcttgagcacatgccactgatttagcagaattcacggctctggcgttttcaagtgtgtgcgattagaggactgccatgggcaaatcccacacccttgaatgggaacaaaaaggtggtctagggaccatgaatcctaagcaggagttaacactcgaccacaaggtgtgatggcccttggccggggctgggaccatcagtgggtctagaaatactgaaaggaaaccgttggctgcccttccaagtgtcccgttcccactagagagagctctgccgttagaccagacgtatttggggaaaaaatgtcaaaaaaaataaaaataaacatctccagatcagaattctaagatactccctctcgcctggcctcattcaggaagacacattcttcctttagagagatgagtgtatttaaatactcttaaacagacccattaagaccatttgcagtgagtttccttgtgtcacgctgatcaattaagtagatcttatttccttcctattggggaagcttgtaacccccaggtaccatcactggcctattttgttggttttactcagaagtctgtgccattgtggctgcttaaaattaaacactttggccaggcttggtggctcacgcctgtaatcccagcacttcgggaggccaaggcgggcagatcacgaggtcaggagttcgaggccagcctgaccaacatggtgaaaccctgtctctactaaaaatacaaaaattagccaggcgtggtggtgcatacctgtaatcccagctactcaagaggctgaggcaggagaattgcttgaacccaggaggcagaggttgcagtgagccaagatcacaccattgtactccagcctgggcaacagagtgagactctgtctcaaaaaaaaaaaacaaaaaagaaagaaaaagaaagaaggaaagaaagggaaaggaaaggaagagagagagagaaagagagaaagaaagacacttcctctctggaaagccagccgtattcatcccagcgtctttcttggtgtctgtgcatggataaagcctccccattcccccgtgccccccaccactttgtgtcctttcactttgcttcacttatgtgcccaccactccagggctccctgaggtccaggaattccatgccattccctttcacatggctgagagccccagccctgtggatgagctgtcctgagtgggcactcagtaatgtgggcgtaagctgaagagggaaggagcaaaaaaacaaccagaagccctcagattcagagtcatgtcgttaaacactttttaagataaaaaattggctgtgcgaactgaaatcaatttaaactattttctttgattaggcaggaaagaggaggctgctgcatattaagaactcccacttaagccaaaccttcatgtttccaatctccaagcaggcgttgagggcctctgggctgagtgtgggagacccaggaagaaagaagagtaggccctgccttcaaggtccttcctgcctaaagcaatctataggcagctgtgttctaacaaaacttttatttataaaacaggcagccagccagcctatgggcagtagtttgccaacctgtgctgtagattaaaaaaggcttaagagatctgtcaaacagtgataatgtatgcacattatttgaatactgattccaacaaactaaaaaagaaaaattataagacaatctgggaaatgtgagcacttaacatttactggatatttgatattaaagaataactacttttagatatgatatttttattatgatagtgctaagaaaaataagatacatactgacgtggatggatgaagtaatatcatgcaggggttttctggggacaggcgaatgggtgggagaggagatgaaacaatattatccatgagttgattttgattaaacctggatagtagatgcaaacaggtttattataagtgatgtacgaatgtttccataataaaaagttttaaaacagacagcaccaggaaacttccacttccagccaagatgaagtatcagaatgtgggtgtgccctcctgcctgaaaaagaaaaagacaaatatgataaacaagacactgaacattagacagtaaaggacagtagtccccaagagattggaaacaaacaaggttagtcctgtaattgcccagctcactgccttgagaaagtttctaatccgtggtacagggagggggaacccagaggaagcttgcctgactccacagtggaaggagacagagcttagagtcccaggagtccaggaggctggagtccacaggtcagagcctgagagcggagacagctacacagagagaactgcagcgattcacagagggtttgcctctgccactcagccaagtgccgatcagtgcctgtgtgtgaggaagctgtgtgcagctggggagagaaccacctgagaggattagaggaaacagtgcctggggctgatacagagccatggaaagtgcctgtgctcaccagccaggctggacaagcactgaatataatacctagaaggatcttgcctcagtaattgggaataattagccctgtaatgaaaacttttctagggctagacacagtagctcatacctgtaatcccaacactttgggaggccaagccaggaggatcgcttgaggacaagagttcaagaccagcctgaacaacatagcaagacctctgtctctacaaaaatcttctaaaaattagctgggcatggtggcatatacctgtggtcctggctactcaggaggctgagttgaggagatcacttgagcccaagagttcgaggttatggtgagctatgatcacactgctgactccagcctaggcaacactaagaccctgactctaaaaaaataaaagtaaataaatcactctgatcatacctaatgaaccttaaaagcaagaagcaagatccacaaggatcacagtgaaatggcctcattgcctgatccaaagttcttgatctcacagccaaggaagtcaaggacacggccacaccaagggtgaggttagagcagaagcagaagtttattaggcaaaagaaagataacagctctctgcagcagagagggatccccaaaagcgttgccattcagcagtgaaatgcaagggtttttataagctagctagtggggaggtgaggtgttatcttacctacatagggtgtgaaaaaccccaggtgtgccatctgcgtagagcatgaatctctggcatcccccaccccacccttttattatacaggcaggtcttttgcctgagctactccacgttgctttcctactgtgtatgtgcttcaaagggggaggtggagcctccatggtggacacacctggccccaggtacccctttctgtctgtgcagctgcaagcatccccccgtgcaagctccagcttccttatctgtttgcagcccggtcttccaggctgctttctattagaagaggagtgatttcctgggctgctttttgttagaagggaagttctgccaaggactctctgccctaactatctgcctagctggtctctttttacctcctctctcaaaagtatttccaagaaatgtaacttcattctacaacaaagctcaataatatttatagaaatataaacttgtccagcaccaaataatgtaaaagtcttgctgtctggcactcaatcagaagttatcaggaatgcaaagtagcaggaacataggacccataatgaggagaaactgttcaatcaaagtcaaaccagaactgctagagatgttaaaattatcagacaagggcactaaaagttattataactgtactctatagaatagaataaggtacatactgacatgctgttcagatgtttaagtaaagttatggaagatactttttaaagcctgagttgaacttccagagatgaagactacatctgagatgaaaaagtaactcagtggaattaacagcacattgcttaatacaaaaaaaagagaaaggttagtgaacatgaagacatagcaatggaaaatatccaaaatgaaacacagaaaaaaatagaagtaaagaaatattaaaggcatcagtgaaagccaggtgcagtggtgcatgcccgcaatcccagctacttgggaggttgaagcagaattattgcttgagcccaggagtttgaggctagcctgggctacataatgagaccctcatctctaaaaaagaaaaaataattaaaaattaaagcatctgtgagctgtggaaaaatgtaagcagcctaaaataagtgtaattggaatccttgaaggagaggcatgaacaataggaaaaaatgattcaaggaaacagtacctataagaaaatgtataagttaaacacctctattagaaaagaagcagggcctcaaatcagttaccttaatttttatcttgaaaactagaaaaaaaaagagcaaattaaacccagacagaagaaatgaaataataaagaccagaacaaaaaacagtgaaatagtaaatggaaaaatagtagagaaagtcagtgaaaccaaaagtgggttctttgagatcaataaaattgataaacccatagccacataatcagaggaaaaagaagatacaaattaacaatatcaagaatgaaagagatgacctcagtacagattctcaagatattaaaaggattataaaggaatattataaacaattctatgccaataaatgcagcaagttaaatgaaattcacaaattatttgaaaggtacaaaataccaaagcctatgcaagaaaaaaaaaaaatgatttgaataggtctatatttattaaagaaatctaagttgtagttgaaaactttctcacaaagataactgcaagcatctatagcttcattggtaaattctaccacacatataaagaaaaaattataccagctcttccaggaaattgaaaaggggttatacttcccaactcattcattctttgcgccagcattaccctaatacaaaaccaagaaagactacagacaaatattcctcatgaagaaaagtgtgaaaacactgaaaaagattttagcaaatcgaatttggcagcatataaaaaggatactacctcatgaccaagtgggttttatcccaagaatgcaaaactagtttaacattcaaaaatcagtcaacataattttccatattaacatactgagaaacagaaggtatacaatcatctcagtaaatgcagaaagagcttttggtaaaatccacattcgtccttgatttttagaaaacactcagaaaactaggaatagaagaaaacttcctcaatcttatataaagtatttacaaaaaagcctacagctaacctgacacctagtgatgaaagaaagcttttccccaaagatcaagagggagataagaatgcgccctttcactacttctatccaacattttcctggacattctggccagtgcagtcaaacaataaattataattaaaaagcacccagattggaaaagaagaagcaaactatctttattcacaggtgacatgatgacatatgtagaatatctaatggaatttaaaagcattttttggaactagtaagtgaagttagcagtgttgtaagatacaaaaccaatatagagaaatcaattgcatttttacaattgcaatgaataattgcattattttttaaaataaattttaaaaatactttattcagtagcatccaaaaatataaaatatgaataaatttacaactgaaacttcaaaacattgcttaaagagatgaaaaacctaaataaagggttaaatgtaccatatccatgggtcaaaagactcaatattgttgagatgttggttctccctagattgctttaaattcagtataatctcaataacaatccaagccagctttttatgtagaaattaacaagttgactttaaaattcatacataaatcccaggacagagaataaacaaaacaaactttgaaaaattggaataaagttagaaagcatatttgttctcacattgctatgaagaaatacccaagactgggtaatttataaaggaaagaggcttagttgactcacagttccacattactggggaggcctcaggaaacttacagtcatggtggaagacaaaggagaagcaggcaccttcttcacagggcagcaggatggagtgagtgcaagcaggggagaggccagacacttataaaaccttcacatctcgtgagactcactcattattcacaagaacaggatgggggaaactgcccccatgatccaatgacctccacccactcatgcccttgacacgtggggattatggggatttcaattcaaagtgagatttgggtggggacatagagccaaactatatcagaagtctgacaatacctgatattaaaactcataagagtacagtaatcaaaactgtgatgttgatcaaatgttcaacatgaagactatcattaataatattgcatagtgtactagaaaatttgctttcaaggcacacacacatacacacacacatacacacacatatgcacaaaggggtaaccgtgaaatgatgaataagctaatgtgcttgactataataaccatttcactatgtataagtgtatcagaacatcatatcatataccttaatatatacaataaagtagtttttttaatgtagagaattagatcaatgaaacaaattggaaagttaagaaatagttcacatatgtggacaactggtcttcaataagcatacaaaagtaattcagtgcaaaaaataatcttttcaacaaattgtgggataattggattttcatatgcaaaagaaatgaactttggtttacatctcactcatatgcaaaaattaccttaaaatggatggtatccctaaatataaaacctaaagctaaaaaagtcttctagaaaaaaacacaggagaaaatctttttattttatttttattatttttttttatttccgtaggttattggggtacaggtggtgtttggttacatgagtaagttctttagtggggatttgtgagattttggtgcacccatcacccgagcagtatacactgaaccctatttgtagtcttttatccctgagtcctcaaagtccattgtgtcattcttctgcctttgcatcctcatagcttagctgccacttataagtcagaacatacgatgtttggttttccattcctgagttacttcacttagaataatagtctccagtctcatccaggtcgctcaaatgccattaattcatgagaaaatctttttaaccttgtcttaggaaaagattttctagacatgataccccatgaacaatccataaaagaaaaattaataaattggacttcattaaaaacttaaactgctttttgaggatagtgttaagagaatgaaaagataaactgcaagttggaagaaaatactgcaaatcatatatctggtaaagtacttgtttctagaatatgtaaagagttctcatgactcaattatttttgtaaaaactatccaattaaaaataagcaaaagctttgaacagacttcaccaaagaagatacatggatagcaaataagcaggtgaaaagatgctcaacatcattaatccttagggaaatgtaacttaaagccagaatgagatagcactacacacctatgagaatgactaaaaccaacaatactgagcataccaaatctcagcaaggatgtggaaaaactggtaaatttgtacgctgctggttttgaatggaaagtggtgcagccactttagaaaacaattcagcaagttcttcaaaattagacatgtacctagtgtacaatccagcaaattttactcctatttatttacttaagaaaaccgaaagcctttgcccatagcaaagcttgtacacagatgtttttggcattcttagtgagggctaaaaaactggaagcaacctaaatacccatcacaggtaaacgggtaaacaaatggtggtagatacatacactggaatgctactcggctctcaatccaaaggagtgaattattgataacgtgcaacaacagagatgactctcaaaataattacatgaagtgaaagaagtgagacaaaaaaaaactacatattgtgcaattccacttatgtaaagtctaggaaatgcatagtgatctatagcgatggaatgcaggtcagtgattgcctcagacagggctgagggcagcagtgagcagtggggattacaaagcagctgaggaatcttttttttttttagacagaggctggagtgcggtggcgcgagctcgtctcactgcaagctctgcctcccgggttcacgccattctcctgcctcagcctcccgagtagctgcgactacaggcacccgccaccatggctggctaattttttgtatttttagtagagatggggtttcaccgtgttagccgggatggtctcgatctcctgacctcatgatttgcctacctcggcctcccaaagcgctgggattataggcgtgagcgaccgcacctggcctgaggaatcttttgagagtggtatatatgtatggtatcttgcagtgataacagacctcagaggtattgcagattcagttccagaccactgcaataaatatagcaataaagcaagtcacatgaattttttggttttctagtgcatatagaaattatgttggctaagcacagtggctcacacctgtagtcccagcactttgagagccaaggaggacggatagcttgagcccagagttccagaccagcttgggcagcatggtgagacctcgtctctattgaaaaaaaaaaaaacaaaaacctacaaaaatcagcctggtttggtggtgcatgcctgtcgtcccagctactggggaggctgaggtgggaggattgcttgagtcgaggagacagaggttgcagtgagtggaaatcacgccactctactccagtctgggtgacagagcaagaccctgtctcaaaaaaaaaaaaaaaaaaagttatctttatactattctgtagtctactaagtgttcaatagcattatatctaaaaaatgtacataacttaatttgaaaaaatactttattgccaaaaatgctaacaatcatctgagccttcagtgagtcataatctttttgctggtggagggtcttgcctcaatgtttatggctgctaactgatcagggtggtgattgctgaaggttggggtggctgtgacaatttcttaaaataagacaatcgtgaagtttgatgcatttaattgactcttcctctcatgaaagatttctctgtagcatgtgtgatgctatttgatagcattttacccacagtggaacttctttcaaaattgaagtcagtcctctgaaaccttgctgctgctttatcaaatgcattttgtaatttctaaatcctttttgtcatttcagcagtgttcacagcatctttaccaggagcagattccatctcaagaaaccactttccttgctcatccataagaagcaactccccaacttgagattgtagcaatttagtcacatcttcagactccacttctaattccagttctcttccaccacatctgcagttaattcttccactgaagtcttggaccccacaaagtcatccatgagagttggaatccatttcttacaaactcctgttaatgttgataatttgaccacctcccatgaatcacagatgttcttattgacttctagagttgtgaatcctttccagaaggttttcaatgtactttgcccagatctatcagaggaatcactatctatggcagttatagccttataaaatgtatttcttaagtaataagagttgcaagtcaaaattgctccttgatccgtggagtacagaatggatgttgtattagcagacgtgaaaacattgatcttgtacatcttcatcagagctcttgggtaactaggtgcattgtcaaatgagcagtaatattttgaaagaaatctttctttctgagcagcatgtctcagcaatgagcttaaaatattcagtaaaccaaggtatcaacagatgtgctgtgcccaggcttctttgttcctatagagcacaggaagagtagatttagtgtcattcttaagggcactagaactttcagaatgataaatgagcattggtttcaacttaaagtcaccagctacaattgtccctgtctgtagaagctttgaagccaggcagagacttattctcatctagcctagataacatcttcttccaatagagggctgtgttgtctacattgaacatctgttgtatagtgtagccaccttaatcagcgatgttagctagatcttctaagatctagagatcttgctgcagcttctccatcagcacttgccacttccccagtgcaataacatgaaacttttatgttattgaagatggcttttttccttaaacctcatgaaccagcctctgctagcttctaacttttcttctgtagcttcctcacctctcttagcctccgtagaattgaagagagttagggtcttgctctggattaggctttggcttaagggaatattgtaactggtttgatctatccagaccacagaccactgaaactttctccgtatcggcaataagactgtttcactttcttatcatttgtgtattcactggagtagcactactaatttctttcaataattattcctttgcattcaaaagttagttaactgtttagtgtaagaggcctagcttttggcccatcttagcttttaaaatgccttcctcactaagcttaaccattcctagcttttgatttaaagtgaaacatgaaattcttttttttttccatttgaacaacttgacattttagggttgttaatagcctaactttaatatgttgtgtctcagggaatagggaggcctgaggagagggagacaggagaatcactggtcagtggagcagtcagaacacacacaacgtttattaagttcatcggtatgtgtgggtgtggttcgtggtgccccagaaccagaactgttgtaattacaacagtaacatcaaagatcactgagcacagatcactataacagatataatcctaatggaaaagtttgaaatactgtgagaattcccaaaatgtgacacagagatgcacagtgagtgcatgctgtttgaaaaatgatgccaataaacttgctcagcacagggttgccacaaacctttaatttgtaaaaagaaaatgcagtatcttcaaagggcaatacagtaaagcacagtaaaatgaggtgtgtctgtatggacacgtgtcagcttctcaaattataaacttaaatatgtgcattttatttggtgtcaattgtataaagcgattaaatttttaaaaggactgatgcagacagcacctggcgtctgggataaggtgtatcattttcctctttatggcaggaactgccacgccccctgttttcatgctgccggagaccagctggcaagtggggggcagtggctctccttgccaatcctgggcatgcaggtgacagtgcagggagagtgcccttcccacatggcccccgtttgtagccacagctgtccctacaaaaactgggcagcctgaagtgaattaacaagacagttttcagatcttcacttgcttgtgggtttcacatgtcacatttaacctccagttacatcgactttttcaaaccccacttaggcatcttagaattttatcatttgcattcttttatgttgaataagagagttgtagtacatgccccactgtctgctttctaaaacatccaggttggagttagcgccttcatacaccctccctggaagcaccaggtgccatcctcagtgcagcggcaaggcagtgtcggggctctctgcccccaggtctctccccgcctggttccattggctgctgggaaggatgcttggatgggaggtctttgtgttttcaggcaggaaatattatttgctccgctagccctaggtcttactaatttactgtgcaatcttcaacaagtttcttgatcttcttgctctgttttctcatctgtaaaattgagggcagtgagcaaggtgacctgtaggtcccaggagcaccaaggtagtgccgtatttagtaccaggttttcctaagaggaaatgggggctacttggggtcaaaacaaaggagagtctttctagatagggaaggactagcagtgggtcaaaacttgccaagaaggactatgaatggagctttgcttggggtttaaaagcttcagtcacagacttggaggggctcaaaccccttgctttagaaggcagaaaccaagaaccactaaggacctaggacttgctgatggtgtctttggagtttaaggtggaactgaagttagagctgatttccttcctgtcacatccagtaagactgggaatggttgggtgccagaggcaggttccagaaggtgggaagagtcctgtctgcgtccccagggtcccaaccttgaggaaagcttgctgtccttctgtcctgcttcacactccctttggttaaaggtttcagtcagagcccgatagaaaccttcaggaaaaaagggccccagactgaggcgaggacactggggaagccttgggcggtttctgtgtggggcagcccctgctctgtgaagcacaggggaacgggactccatcgctgtcatcggcactcatgccctggtgcagacctgcaggaacattgcctgctgtatacagggcagatgggcactgtgccgggagaagcctgtaggaagggaggccttgagggataaggagggaactccggccatgagcatgcacagagctccgtgaaggaaggccttgacagacagaggcatggtgggtggagacgggtggagaacatcccggcagaacacagagcacgtgctgtggcttgctggcagggacatgtatgctgtgtaaaggcagggagtaggtccaggtgccctgggaagagtgtgtgtagagaaacgtcgtggaagaggagacacccaacgcgaggtcatggctggtttgcttgctgtgtttaaactgccatagactggcttttgtcagcagtggcagagagagggggttgcatttttctctttttagtttgcttttgaggtctccctctctctgtagagtggctgtgaagtccagccctgccctgacggggctccaggggaggtggttgtgcatgtttatgatgtgccttcacggggtacttctttatcctggtggatggcagaatccctgtgtctgacctgtgcccaggtctctcctgggagacttgtttaccctcttagacacccttgagtctcttgtctgtgtctggtgtatttatttatttagcctaccaagatagccactctttaggacagttctgaatttggaaagaagttaggttcaggtgtgtcggtcgagtgagacacagaggaggccactcaacaaaacctatgaaataccagaagcagtgagttcctcgcaggtccggagagaagagggcagcacgctggactaggggagccgtcaggacctgtgtgctcgctagcgggtggggagcaagatagatggagtgtgggctctgagggctgaagcctttatggggtccaggccatcaccccagcaggttccccacaaggagttgtaattcgttgggttagagcaggtaggcacaagttacaggaggccatgctgtgagtgaagggtggtcatggcagcatatctgagcagtccatgctgggtgtgagggtctgcagggtgggtcaagtaggttgcatctagctgtcccttagggacttggtcaccaggaggcagctatataaggcacatctctggatcgaccattttgagggcctgggaagaggtggagacctggaaactttcaaggatgactaagccctgcttctggtatgagaaagtccaacatacattcaaaataggtaccaagaaagcataacattataagaattcactgcagaggatcatctgaaaggtctaaggtgagaaatgaatatctagtgtagaagttggagaggcatccataggaatgatctctaatgaactggatctccctccaagatagagatcaaaattggtttaaaacaaatacaggggggtggagccaagatggccaaatacgaacagctctggtctacagcttccagcgtgagcaacacagaagacgggtgatttctgcatttccatctgaggtaccaggctcatctcactagggagtgccacacagtgggtgcaggacagtgggtgcagcgcactgtgcgtgggccgaagcagggcaaggcattgcctcactcgggaagctcaaggggtcagggaattccctttcctagtcaaagaaaggggtgacagacggcacctggaaaatcggttcactccaacctgaatactgtgcttttccaacgggcttaaaaaacggcacaccaggagattatatcccgcatctggctcggagggtcctacgcccacggagtctccctgattgctagcacagcagtctgagatcaaactgcaaggtggcagtgaggctgggggaggggcgcctgccattgcccaggcttgattaggcaaacaaagcagccgggaagctcgaactgggtggagcccaccacagctcaaggaggcctgcctgcctctgtaggctccacctctgggggcagggcacagacaaacaaaaagacagcagtaacctctgcaaacttaaatgtccctgtctgacagctttgaagagagtagtggttctcccagcacacagctggagatctgagaacgggcagactgcctcctcaagtgggtccttgacccccgagcagcctaactgggaggcacccccaagtgggggcagactgacacctcacacggccaggtactcctctgagacaaaacttccagaggaaagatcaggcagcagcatctgtggttcaccaagatctgctgttctacagccaccgctgttctacaggcaccgctgttctgcagccaccgctgctgatactgaggcaaacagagtctggagtggacctctagcaaactccaacagacctgcagctgagggtcctgtctgttagaaggaaaactaacaaacagaaaggacatccacaccaaaaacccttctgtacgtcaccatcatcaaagaccaaaagtagataaagccacaaagatggggaaaaaacagagcagaaaaactggaaacactaaaaagcagagcacctctcctcctccaaaggaacgcaccttctcaccagcaacggaacaaagctggacggagaatgactttgacgagctgagagaagaaggcttcagacgatcaaactactctgagatacaggaggaaattcaaaccaatggcaaagaagttaaaaactttgaaaaaaaactagatgaatggataactagaataatcaacgcagagaagtccttaaaggagctgatggagctgaaagccaaggctcaagaattacgtgaagaatgcagaagcctcaggagccgatgcaatcaactggaagaaagggtatcagtgatggaagatgaaatgaatgaaatgaagcgagaagggaagattagagaaaaaagaataaaaagaaatgaacaaagcctccaagaaatatgggactatgtgaaaagaccaaatttacgtctgattggtgtacctgaaagtgatggggagaatggaaccaagttggaaaacactctgcaggatattttccaggagaacttccccaatctagcaaggcaggcaaacattcagattcaggaaatacagagaacgccacaaagatactcctcgagaagagcagctccaagacacataattatcagattcaccaaagttgaaatgcaggaaaaaatgttaagcgcagacagagagaaaggtcgggtaacccacaaagggaaacccatcagactaacagctgatctcacggcagaaactctacaagccagaagagagttggggccaatattcaacattcttaaagaaaagaattttcaacccagaatttcatatccagccaaactaagcttcataagtgaaggagaaataaaatactttacagacaagcaaatgctgagagattttgtcaccaccaggtctgccctaaaagagctcttaaaggaagaacttaacatggaaaggaacaactggtaccagccactgcaaaaacatgccaaaatgtaaagaccatcaaggctaggaagaaaactgcatcaactaacgatcaaaataaccagctaacatcataatgacaggaccaaatacacacataacaatattaactttaaatgtcagtgggctaaatgctccaattaaaagacacagactggcaaattggataaagagtcaagacccatcagtgtgctgtattcaggaaacccatctcatgtgcagagacacacataggctcaaaataaagggatggaggaagatctaccaagcaaatggaaaacaaaaaaaggcaggggttgcaatcctagtctctgataaaacagactttaaaccagcaaagatcaaaagagacaaagaaggccattacataatggtaaagggatcaattcaacaagaagagctaactatcctaaatatatatgcacccaatacaggagcaccaagattcataaagcaagtcctgagtgacctacaaagagacttagactcccacacattaataatgggagactttaacaccccactgtcaatgttagacagatcaacgacacagaaagttaacaaggatacccaggaaatgaactcagctctgcagcaggcagacctaatagacatctacagaactctccaccccaaatcaacagaatatacatttttttcagcaccacacctattccaaaattgaccacatagttggaagtaaagcactcctcagcaaatgtaaaagaacagaaattataacaaactgtctctcagaccacagtgcaatcaaactagaactcaggactaagaaactcactgaaaaccactcaactacatggaaactgaacaacctgctcctgaatgactactgggtacatcacgaaatgaaggcagaaataaagatgttctttgaaaccaacgagaacaaagacacaacataccagaatctctgggacacattcaaagcggtgtgtggagggaaatttatagcactaaatgcccacaagagaaagcaggaaagatccaaaatcgacaccctaacgtcacagttaaaagaactagaaaagcaagagcaaacacattcaaaagctagcagaaggcaagaaataactaaaatcagagcagaactgaaggaaatagagacacaaaaaacccttcaaaaaattaatgaatccaggagctggttttttgaaaggatcaacaaaattgatagactgctagcaagactaataaagaagaaagagagaagaatcaaatagacacaataaaaaatgataaaggggatatcaccactgatcccacagaaatacaaactaccatcagagaatactacaaacacttctacacaaataaactagaaaatctagaagaaatggataaattcctggacacatacaccctcccaagactaaaccaggaagaagttgaatctctgaatagaccaataacgagctctgaaattttagcaataatcaatagcttaccaaccaaaaacgtccaggaccagatggattcacagccgaattctaccagaggtaaaaggaggagctggtaccattccttctgaaactattccaatcaatagaaaaagagggaatcctccctaactcattttatgaggccagcatcatcctgataccaaagcctggcagagacacacacaaaaaagagaattttagctgaatatccttgatgaacattgatgcaaaaatcctcaataaaatactggcagaccgaatccagcagcacctcaaaaagcttatccaccatgatcaagtgggcttcatccctgggatgcaaggctggttaaatgtacacaaatcaatagatgtaatccagcatataaacagaaccaatgacaaaaaccacatgattatctcaatggatgcagaaaaggcctttgacaaaattcaacaacccttgatgctaaaaactctcaataaattaggtattgattggacatatctcaaaatattaagagctatctatgacaaacccacagccaatatcatactgaatgggcaaaaactggaagcattccctttgaaaactggcataagacagggatgccctctctcaccactccgattcaacatagtgttggaagttctggccagggcaattaggcaggagaaggaaataaagggtattcaattaggaaaagaggaagtcaaattgtccctgtttgcagatgacatgattgtatatctagaaaaccccattgtctcagcccaaaatctccttaagctgataagcaacttcaacaaagtctcaggatacaaaatcaatgtgtaaaaatcacaagcattcttatgcaccaataacagacaaacagagagccaaatcatgagtgaactcccattcacaattgcttcaaagagaataaatacttaggaatccaacttacaagggatgtgaaggacctcttcaaggagaactacaaaccactgctcaatgaaattaaagaggatacaaacaaatggaagaacattccatgctcatgggtaggaagaatcaatatcgtgaaaatggccatactgcccaaggtaatttatagattcaatgccatccccatcaagctaccaatgactttcttcacagaattggaaaaaactactttaaagttgatatggaaccaaaaaagagcccgcattgccaagtcaatcctaagccaaaagaacaaagctggaggcatcaccctacctgacttcaaactatactacaaggctacagtaaccaaaacagcatggtactggtaccaaaacagagatatagatcaatggaacagaagagagccctcagaaataatgccacatatctacaaccatctgatcttcgacaaacctgacagaaacaagcaatggggaaaggattccctatttaataaatggtgctgggaaaactggctggccatatgtagaaagctgaaactggatcccttctttacaccctttacaaaaattaattcaagatagactaaagacttaaacattagacctaaaaccataaaaaccctagaagaaaacctaggcaataccattcaggacataggcacgggcaaggacttcatgtctaaaacaccaaaagcaatggcaacaaaagccaacattgacaaatgggatctaattaagctaaagagcttctgcacagcaaaagaaactaccatcagagtgaacaggcagcctacaaaatgggagaaaatttttgcaacctactcatctgacaaagggctagtatccagaatctacaatgaactcaaacaaatttaaaagaaaaaaaacaaacaaccccatcaacaagtgggtgaaggatatgaacagacacttctcaaaagaagacatttatgcagccaaaaaacacatgaaaaaatgctcatcatcactgaccatcagagaaatgcaaatcgaaaccacaatgagataccatctcacaccacttagaatggcgatcattaaaaagtcaggaaacaacaggtgctggagaggatgtggaaaagtaggaacacttttacactgttggtgggagtgtaaactagttcaaccattgtggaagtcagtgtggcgattcctcagggatctagaactagaaatatcatttgacccagccatcccattactgggtacatacccaaaggattataaatcatgctgctataaagacacatgcacacgtatgtttattgcagcactattcacaatagcaaagacttggaaccaacccaaatgtccaacaaccatagactggattaagaaaatgtggtacatatacaccatggaatactatgcagccataaaaaatggtgagttcatgtcctttgtagggacatggatgaaactggaaaccatcattctcagcaaactatctcaaggacaaaaaaccaaacactgcatgttctcactcataggtgggaattgaacaatgagaacacatggacacaggaaggggaacatcacactccggggactgttgtggggtggggggaggggggagggatagcattaggagatatacctaatgctaaatgacgagttaatgggtgcagcacaccagcatggcacatgcatacatgtgtaacaaacctgcacattgtgcacatgtaccctaaaacttaaaagtataataataataataaaagaagttgccatagccaccctaaccttcagcaactaccagcctgatcaatcagatgccatcaacgtggaggagagaccccccattagcaagattacaacttgctgagggctcagatgattgttagcacttttttttttaacaataaagtaatctttaaggtgtaaaaaagaaaccataaaaacaaaaaaacaaaacaaaaaaaaaacaaatataggccgggtgcagtggctcacacctgtaattccagcactttgggaggccaaggcaggagaatcacttgaggcgaggagttggagcccagcctgggcaatatagtacaaccctgtctttactaaaaatacaaaaattaaccaggtatggtggcacacacctgtagtcctggcaactgaggaggctgaggcaggagaatcatttgaacccaggaggtcaaggctgcagtgagctatgattgcaccactgcaatccaacttgggcaacacagtgagaccctgcctcaaaaaaaattatattctgattttctgagtccatgaacacattgtccaaatggatttttctagctcctccaagttacagatagttccatgcacacacagaacccaccactctcaaatattttccccactagtatactattaaatttttcaaacatgcaaaagatgaaagaattgctcaatgaacaccatgtacccaccacctagattctacaattaacattttaccctactttctttgtcacatatatgtacctatccatctacccattcttccatgaatccatcaattcatctaattttttgtatatttcaaggtaagttgtagatacgtagcttacatttcaccttaaatgtttccgcctggctattattaactggagtgcaatatgtttttggttctttatggtaaaatctatgtgcaatgaaatgcacaagccttaggtatgccattaataggtattgacgaatagacacaccttgtgtctgaaactgtaataaaaaaatcaaacactaccttcctttcaaaaagtttcctcacttcttttcttggtcaaaacccctccccacctcagcccacccctcagcaaccattgttctcaatttttttttgcattcctagattgattttgcttgttccataacctcgtataaatgaaagtgtacagtgtgcaaggtttgtgtctggtttttccaccaagcacatttctgaaattcatctatgttgagtatattagcagttcatttcttttgaagaaagaatgaagtgtgctaagtagtgtttcattgtgtggctataccacagtttgtttttttatccatcactatttaatgggtatctgggtggtttctggctttggctactatcagtaaagctactacagacatttctgtagaagtctttttatggagatgtggctttgcttttcttgggtaaacacctatgagtgaactctctggatcccaggtagatgtagctaggtcataggcagatgtatgttgagtattacagaaactgctagaccttttcaattgtgttcatattgttttatactcccactgtaacaacatacgagagtcctgcttgctccatcatctttgatgtttagtgttgtcagtctttttaactttagccattctggtgcatttgtatgtcattccattgcagttctttttttttttttttaaatcaggaatgtttagtcgaagtctgatattgtggtgtactagtcatctattgccgcatacaaaaatcatcccaaaatttagcagcctaagataaccatcatatatttcttacaccatttctgaggctcataaatccaagcgtggtgtaactggctcagggtccttctcgaggctacagtctagctggggctgcaggaccttcttccatccccactcgcagggctgctggtggcctcaattcttcactggcggtcagcaggagacctcagagcctcaccacagcctcttccctggctgcctgggcaaccttgtaaagcatcagttgacttccctcagagtgagtgatgagggagagataaagcgacagcttatggtggaagccacagtgtgtcatggagtaatctcggaagtgacatcccatcacataggctataatccatcggtcatacagactaaccctagtacaaagtggagggggccacacagagggatccttgggggctatcttggagggtggccaccccgtggggagaaggtggaagcagccacctcagggaggcagattgtaatcaggacccataggagcagcatggagcccatgtgtttctgtgcagtttgctgaagccagtcagaacatcctgagtctgacttatcacccttctctggcctgctggggttcctgaaccaagtagtttaacttgccaagccttagtttctgcagttataaaatggtggtatgaatgaatgaaacaaggtatccgcaacactgaaatggaacataatagggcctgaacagaggacagttatgaatatttccatacaaaatgcaattttatgcccttcatcaatggtcattttctctcattttacttttgaggactagatttgccaaagtccctctggggccaacccagtacaccactgagaagccctttgaaaaagccagctttatcatcgttttgtttttatttcttgatatttggaaagttttcttccttctgtttctatgtgtcctctgcctaactagtcatggtgactccttggatagtattctccatggtttcttgtgaaatattaatgcttaccttgcaatcttgcagcttttagcatgaattattttgctgattataatcaggcctctaggataagtaccactgattttaatttaatgttaaatttgtactgagtgaatcataatggtcagactaatctaaatggtgcaggtatataaaactacatgcccatgtgctcagttcctgcttgttgatgttttgttataaagtaacagctttttaacatcaaatgtattccaagtagccactttacagtgacactgcaaaacctactacaaagcaaagccaataagacaaagtcaaaatatttcaaagtttcttattgaagtattgcatacctctagaaattacaacataactgtacaacttaatgaattctcagaaaatgtagcatcagtgcaaatatcattgaaatcaaatcggtggggcagttccaagttggccgaataggaacagctccagtctacagctcccagcgtgagcgatgcagaagacaggtgatttctgcatttccaactgaggtaccgggttcatctcactggggcttgtcagacagtgggtgcaggacagtgggtgcagcgcaccgagcatgagccgaagcatggtgaggcatcacctcacccgggaagtgcaaggggtcagggaattccctttcctagacaagcaaagctgtcacagatggcacctggaaaatcaggtcactcccaccctaatactgcgcttttccaatggtcttagcaaatggaacaccaggagattatatcccacgcctggctcggagggtcccacgcccacggagcctcgctcattgctagcacagcagtctgagatcaaactgcaaggcggcagtgaggctgggggaggggcgcccgccattgctcaggcttgagtaggtaaacaaagcggccaggaagctcaaactgggtggagcccactgcagctcaacgaggcctgcctgcctctgtagactccacctctggggacagggcatagctgaacaaaaggcagcacaaacctctgcagacttaaatgtcccagtctgacagctttgaagagagtagtggttctcccagcacggagtttgagatctgagaacagacagactgctttctcaagtgggtccctgacctctgagtagcctaactggaaggcacccccgaagtaggggcagactgacacctcacacggctgggtacccctctgagacgaaacttccagaggaaagatcaggcagcaacattcgctgttcagcaatattcgctgttctgcagcctctgctgctgatacccaggcaaacaggttctggagtggacctccagcaaactccaacagacctgcagctgagggtcctgactattagaaggaaaactaacaaacagaaaggacatccacaccaaaaccccatctgtacgtcaccatcatcaaagaccagaggtagataaaaccacaaagatggggaaaaaacagagcagaaaaactgaaaattctaaaaatcagagtgcctctcctcctccaaaggaacgaagctcctcaccagcaatggaacaaagctggacggagaatgactttgacgagttgagagaagaaggcttcagacgatcaaacttttctgagctaaaggaggaagttagaacccatcacaaagaagttaaaaaccttgaaaaaagattagacgaatggctagctagaataaccaatgcagagaagtccttaaatgacctgatggagctgaaaaccatggcatgagaactacgcgacgaatgcacaagcttcagtagccaattccatcaactggaagaaagggtatcagtgattgaagatcaaatgaatgatatgaagcaagaagagaagtttagagaaaaaagaataaaaagaaacaaacaaagcctccaagaaatatgggactatgtgaaaagaccaaatccacgtctgattggtgtacctgaaagtgagggggcgaatggaaccaagttggaaaacactctgcaggatattatccaggagaacttccccaacctagcaaggcaggccaacattcacattcaggaaatacagagaacaccacaaagatactccttgagaagagcaactccaagacacataattgtcagattcaccaaagttgaaatgaaggaaaaaatgttaagggcaaccagaaagaaaagtcgggttacctacaaagggaagcccatcagactaacagctgatctctcggcagaaactccacaagccagaagagagtgggggccaatattcaacattgttaaagaaaagaattttcaacccagaatttcatatccagccaaactaagcttcataagtgaaggagaaataaatcctttacagacaagccaatgctgagagattttgccaccaccagacctgccctacaagagctcctgaaggaagcactaaatgtggaaaggaacaactggtacagccactgcaaaaacatgccaaattgaaaagaccatcgatgctaggaagaaactgcatcaactaacgagcaaaataaccagctaacatcataatggcagtatcagattcacacataacaatattaaccttaaatgtaaatgggctaaatgctccaattaaaagacacggactggcaaataggataaagagtcaagagacatcagtgtgctgtattcaggaaatccatctcacatgcagagacacaaataggctcaaaataaagggatggaggaagatctaccaagcaaatggaaaacaaaaaaaaaggtaggggttgcaatcctagtctctgataaaacagactttaaaccaacaaagatcaaaagagacaaggccattacataatggtaaagggatcaattcagcaagaaaagctaactatcctaaatatatatgcacccaatacaggagcacccagattcataaagcaagtccttagagacctacaaagagacttagactcccacacaataataatgggagactttaacaccccactgtcaacgatagacagatcaacgaaacagaaagttaactaggatatccaggaattgaactcagctctgcagcaggcagacctagtagacatctacagaactttccaccccaaatcgacagaatatacattcttctcagcaccacgtcacacttattccaaaattgaccacgtaattggaagtaaaacactcctcagcaaatgtaaaaaaacagaaattatagcaaactgtttctcagaccacagtgcaatcaaactagtactcaggactaagaaactctctcaaaaccgctcaactacatggaaactgaacaacctgctcctgaatgactactgggtacatcacgaaatgaaggcagaaataaagatgttctttgaaaccaacgagaacaaagacacaacataccagaatctctgggacacattcaaagcggtgtgtggagggaaatttatagcactaaatgcccacaagagaaagcaggaaagatccaaaatcgacaccctaacgtcacagttaaaagaactagaaaagcaagagcaaacacattcaaaagctagcagaaggcaagaaataactaaaatcagagcagaactgaaggaaatagagacacaaaaaacccttcaaaaaattaatgaatccaggagctggttttttgaaaggatcaacaaaattgatagactgctagcaagactaataaagaagaaagagagaagaatcaaatagacacaataaaaaatgataaaggggatatcaccaccgatcccacagaaatacaaactaccatcagagaatactataaacacctctacacaaataaactagaaaatctagaagaaatggataaattcctggacacatacaccctcccaagactaaaccaggaagaagttgaatctctgaatagaccaataacagtctctgaaattgaggcaataatgaatagcctaccaaccaaaaaaagtccaggaccagacagattcacagccgaattctaccagaggtaaaaggaggagctggtaccattccttctgaaactattccaatcaatagaaaaagagggaatccttcctaactcattttatgaggccagcatcatcctgataccaaagcctggcagagacacacacaaaaaagagaattttagactaatatccctgatgaacatcgatgcaaaaatcctcaataaaatactggcagaccgaatccagcagcacctcaaaaagcttgtccaccatgatcaagtgggcttcatccctgggatgcaaggctggttcaacatacacaaatcaataaatgtaatccagcatataaacagaaccaaagacaaaaaccatgtgattatctcaatagatgcagaaaaggcctttgacaaaattcaacaacccttgatgctaaaaactctcaataaattaggtattgatgggacatatctcgaaataataagagctatctattacagacccacagccaatatcatactgaatgggcaaaaactggaagcattccctttgaaaactggcacagacagggatgccctctctcaccattcctattcaacatagtgttggaagttctggccagggcagtcaggcaggagaaagaaataaagggtattcaattaggaaaagaggaagtcaaattgtccctgtttgcagatgacatgattgtatatctagaaaaccccattgtctcagcccaaaatctccttaagctgataagcaacttcagcaaagtctcaggatacaaaatcaatgtgtaaaaatcacaagcattcttatgcaccaataacagacagagagccaaatcatgagtgaactcccattcacaattgcttcaaagagaataaaatacctaggaatccaacttacaagggatgtgaaggacctcttcagggagaactacaaaccactcaatgaaataaaagaggatacaaacaaatggaagaacattccatgctcatggataggaagaatcaatatcgtcaaatggccatactgcccaaggtaatttatagattcaatgccatccccatcaagctaccagtgactttcttcacagaattggaaaaaactactttaaagttgatatggaaccaaaaaagagcccgcattgccaagtcaatcctaagccaaaagaacaaagctggaggcatcaccctacctgacttcaaaccatactacaaggttgcagtaaccaaaacagcatggtactggtaccaaaacagagatatagatcaatggagcagaacagagccctcagaaataataccacacatctacaaccatctgatctttgacaagcctgacaaaaacaagaaatggggaaaggattccctatttaacaaatggtgctgggaaaactggctagccatatgtagaaagctgaaactggatctcttccttacaccttatacaaaaattaattcaagatggattaaagacttaaacattagacctaaaaccataaaaaccctagaagaaaacctaggcaataccattcaggacataggcatgggcaaggactcatctctaaaacaccaaaagcaatggcaacaaaagccaacattgacaaatgggatctaattaaactaaagggcttctgcacagcaaaagaaactaccatcagagtgaacaggcaacatacagattgggagaaaatttttgcaatttacttatctgacaaagggctaatatccagaatctacaaagaactcgaacaaatttaaaagaaaaaaacaaccccatcaacaagtgggcaaaggatatgaacagacgcttctcaaaagaagacatttatgcagccaacagacacatgaaaaaatgctcatcatcattggccatcagagaaatgcaaatcaaaaccacaacgagataccatctcacaccagttagaatggcaatcattaaaaagtcaggaaacaacagatgctggagaggatgtggagaaataggaacacttttacattgttggttggactgtaaactagttcaaccattgtggaagacagtgtggcgattcctcaggtatttagaactggaaataccatttgacctagccatcccattactgggtatatacccaaaggattataaatcatgctgctataaagacacatgcacatgtatgtttattgaggcactattcacaatagcaaagacttggaaccaacccaaatgtccatcaatgatagactggattaagaaaatgtggcacatatacaccatggaatactatgcagccataaaaaatgatgagttcatgtcctttgtagggacatggatgaaactggaaaccatcattctcagcaaactatcacaagaacaaaaaaccaaacaccgcatgttctcactcataggtgggaattgaacaatgagaacacttggacacaggaaggggaacatcacacaccagggcctgttttggggtgggcggagggggcagggatagcattaggagatatgcgtaatgtgaatgacgaattaatgggtgcagcacaccaacatggcacatgtatacatatgtaacaaacctgcatgttgtgcacatgtaccctagaacttaaagtataataaaaaaattaaaaaataataaaataaaaataaaaaaggaaatcaaatcaaactgtgactatcagcagccagaaatctctttccttccctcttcctatcactgcaccttctttctccccagaggtaactagaactacagtcatgacttctaacaccttaggttagtctttcctgtgcttaagctttgtatacatggaatcatgcagtatatattcctgtgtatctgccttcttttgcacatagacacatagatataaatgtatataagtcttgccagagttatcagttatctttttttcttttttttttgacatggagtctcactctgtcaccaggggagtgcagtggcacagtctgggctcactgcaacctctgtctcccgggttcaagcaattcttctgcctcagcctcccaagtagctgggactacaggcacctgccaccacggccagctaatttttgtatttttagtagagacggggtttcaccatgttggtcaggatggtctcaatctcttgacctcgtgatccatccacctcggcctcccaaagtgctgggattacaggcgtgagccactgcacccggccaagttatcgattattctaagtctttccaaagaaccattttttggcttcatcgattctctttatcatttgtcgtctgttccattaaaatctgatgttatcctcataaatgtttgatatatttggttgtagatctaccctctcagcatttgtgagttcttttcttggtcttgttgtttctccttttttccttctttatttgttggttaaatttgctatttcttaaaactgtttgagatcggtactcagatcaggggttggcaaacttctttccatggcaggacagatagtaagtactttgggctttgcaagctacacatgcttcctgtcacatattctttcttttaaacttaaaatgtaaaagctggttgggcacggtggctcatgcctgtaatcccagcactttgggaggccgaggtgggcagatcacctgaggtcaggagttcaagaccagcctggccaacaaggtgaaaccccgtctctactgaaaatacaaaaattagccaggcacagtggtggttgtctgtaatcccagtactcgggaggctgaggcaggagaatcgcttgagcctgggaggtggaggtttcagtgagccaagattgcgccactgcactccagcttggagacagagcaagactctgtctcaaataaatgaataaaagtaaaatgtaaaagctattcttagtttatgcattgtacaaaaacaggggcagagtggaattggcccatgggtcataatttgcaaacccccaacttagattgttgaggcccagcctcttcttttcacatatatatataaatggttatacatttccagttaattcctcagcatgtaaggattttccacttctctttctgttattgatttctgtcaagcgcacacaccagacaaggcaagagcaaggtctgcctgattcaaccagtaaggatgcgacaggccagttttagatgcagacggtttattacttacatagacagcaaaggagagagtagccaaggtgccagctcccaggtccttgtttcacatgccagaaagcatgacactgaaacaaaagggatggagtgctgcatgagttgtgcaagaccccattgctggggagcctgttctgcgctgcagctaagaggtttcaccgctttattacagttttattttcattcatgtctaccatcctgagggggtgggagaagaaaggcccatacctcatcagaacagtgaggccaggtggagctgtctgatgactgccttgcaggggagagagaaggtgagggagagatgtcctcagagcagtgcctgacagacctcccatctgcccctgtgccagaaggatcccaaggcattctgccaagactcagaccgcggttgaagcctgtgcctgtggggtctctgttggtacctggaaggtcacctgggcacggtggcacagccagtcccctacaattccctgtcctcttccagttggtcagagaagagagtctgaatgatttcagccttttgaaatttgggacttgctttatggcctagcatatgatcaattttggtaaacgttccatgttcacaaagaaacaaaaagtggattttgtgattcttggtgcagtgatctgtatatgttaattggatcgtatttttcatgtgatttaaatccatactgattatttttgtctgcttgttctatcagctactgacagcactttgttaaaacctccaactatgatcgtggacttgtatatttctctttattttctgtcgatttttcctttatataatttgaagttaagaatagacttgtcatagcttcctgtaggactgatattttattataaacttttttctgtcattactaaagttttattttcattaacgtcaacttgtctgacattggtttttctacattagctcttttgattagtgtttgcatgatatatttttaaaatcattctactttcaacctttgtgacagtttgtgattcagatgtaagcaatgtaaaattaaggttttttaaatccagtctgatcatctgttttttacttgaagcattttagtttacctacattggatgtgataactgatctagttggttatagatctaacatctcattatttgcttttgtttgccctgtcatttcctttttcatctttcctgcataattttgtataaatcaaagtatttattaatgttctattctattagcttcttcccggtacattcctttactattcttttggtagttacgatagaggttacgatatacatccttgactatcgagtttcccttaaaatagtacttgtaccatactttggacaattcaaggaacttagtacttctgaacaccatttagccccttctgccttgtatattaatattgtcccataatttgattctctttcaaattccgtagggcaacgttattttctatagggtcaatacccacttggctataatgattttccgttgttctttattttttcctgtagctctgagcttcaatctgagattatttccttctacctaaagaacaccttttagtattttctatagtgtggtcccctggtgataagtgtctgaaatttttttttattttgcatctgcttttaaagaataattttacaagatataggactgtagactggcatttatgtatgtatttacttatttttgaactctgaagatattccattttcttctggcctttattatttccatttaaaagtcaaggtagtcttttttcttatactgtttctaaaatattttcctttatcataggttttcagcagttttattataacatgcagacttgcatttttcttatatttatgctccttggggttcataccacttctggatctgtggcttgatatctttcactaattttagaaaattctcagtcattgtctttttttttctatttttccataggttattggggtgcaggtcgtgttcggttacatgagtaagttctttagtggtgatctgtgagattttggtgcacccatcacctgagcagtaatacactgcaccctatttgtagtcttttttcccttgccctcctcccattcttcccccaagtccacaagtccattgtatcattcctatgcctttgtgtcctcttagcttagctcctacatatcagtgagaacatatgatgtttggtttttcattcctgagttacttcacttagagtaatagtctccaatcttatccaggttgctgcgaatgcctttgattcattcccttttatggctgagtaatattccattgtgtatacatatatatatacaccacagtttctttatctactcattgattgatggacatttgggttggttccacgattttgcagttgtgaattgtgcagccacaaacatgcatgtacaagtgtctttttcatataataacttcttttcctctaggtggatacccagtagtgagattgctagatcaaatggtagttctagttctttaaggaatctccatactgttttccatagtggttgtactagtttacattcccaccagcagtagaagtgttccctgatcactgcatccatgcctcaatctactgttttttgatttttttattatggccattcttacaggagtaaggtggtatcacattgtggttttgatttccatttccctgatcattaatgatgtagagcattttttcatatgtttgttggccatttgtatatcttcttttgagaattgtctgttcatgtccttagcccactttttgacgggattgtttgtttttttcttgctgatttgtttgagtttgggttctagattctggatattagtcctttctcaaatgtatagattgtgaagattttctcccactctggaggttgtctgtttactctgctggctgttccttttaccatgcaaaagctctttagtttaattaagttccagctatttatctttgtttttattgcatttgcttttgggttcttgctcatgaaatccttgcctaagccaatgtctagaaggggttttccaatgttatcttctagaatttttatagtttcaggtcttatatataagtcattaatccctcttgagttgatttttgtaaaaggtgagagatgaggatcctgtttcattctcctacatgtggctagccagttatcgcagcaccatttgttgaaaagggtgtcctttccccactttatgtttttgtttgctttgtcaaagatcagttggctgtaagtatttgggcttattgctgggtactctattctgttccattggtctatgtgcctacttttgtaccagtaccatgctgttttggtgactatggccttaaagtatagtttgaaatcaggtagtgtgatgcctccagatttgttctttttgcttagtcttactttggctatgcaggctcttttttggttccatatgaattttagaattgttttttctaattctgtgaagaatgacgatggtattttgatgggaattgtgttgaatttgtagattgcttttggcagtatggtcattttctcaatattgagtctacctatccatgagcatgggacgtgtttccatttgtttgtgtcatctatgatttatttcaccagggttttgtagttttctttgtagaggtctttctcctcctcagttaggtatattcctaggtattttatttttttgcagctattgtaaaaggggttgagttcttgatttgattatccgcttggtcactcttggtatatagaagagttaccaatttgtgtacattaatcttgtatccagaaactggtgaattcttttagcagttctaggagctttctggaggagtcttcagggttttcaaggtaaacaatcatattgttagccaacattgacagtttgacttcctcatcaccgatttggatgccttttatttctttctcttgtctgattgccctggctaggacttccagtactatgttgaagaagagtagtgagagtgggcatccttgtcttgttccagttctcagagggaatgctttcaacttttcccattcagtattatgttggctgtgggtttgtcatagatggcttttattacattgaggtatgtctcttgttgctgattttgccaagagttttaatcttaaaggatgctggatttgtcaaatgctttttctgcatctattgaaatgatcacatgatttttgtttttaattctgtttatgtggtgtatcacatttatcaacttgcatatgttaaatcgtttctgcattcctggtatgaaacccacttgatcatggtggattatctttttgatatgttgttggatttggttagctagtattttgttaaggattttagcatctttgttcagcaaggatatcggtctatagtttttcttttttggttatgtccttccctggttttggtattagggtgatgctggcttcatagaatgcatcagggagggtcccttctttctctatcttgtggaatagtgtcaaaagaattggtaccaattctttgtctggtagaattctgctgtgaatccgtctggtcctggacttttttttgttggtaatttttaaattaccatttcaatctccctgcttgttattggtctgttcagggtatctaattcttcctgatttaagctgagggttgtatttttccaggaatttatccatctcttctatgttttctagtatgtgagtaaagatgttcatagtagccttgaatgatcatttgtatttctgtggtgtcagttgtaatatctcccatttcatttcttaatgaggttatttggattttctctcttcttttcttggttaatcttactaatggtctgtcaattttatttatcttttcaaagaaccagctttttgtttcatttatcttttgtatttgtttgtttgtttgtttcagcttcatttagttctgctctgatcttggttatttcctttattctgctgggtttggctttggtttgttcttgtttctctagttccttgaggtgtgacctgagaatgtcagtttgtgctctttcagtctttttgatgtaggcgtgtagggctatgaagtttcctcttagcacctcctttgctatatcccagagattttgataggttgtgtcgttattgtcattcagcttgaagaattttttaatttccatcttgatttcatttttgacccaatgatcattcaggaataggttacttaatttccatgtgtttgcatggttttgaaggttccttttggagttgatttccagtttgattccagggtggtctgacagagtgcttaatataatttcatttttctggccgggcatggtggctcacgcctgtaatcccagcactttgggagtccgaggcaggcagatcacgaggtcaggagatcgagaccatcctggctaacacggtgaaaccccgcctctactaaaaatccaaaaatacaaaaaattagccaggcgtggtggcgggcgcctgtagtcccagctacttgggaggctgaggcaggagaatggcgtgaacctgggaggcggagcttgcagtgagccaaggttgcgccattgcattccagcctgggcaacagagtgagactccgtctcaaaaaaaaaaaaaaaaaaaaaatatatatatatatatatatatataatttcatttttcttaaatttattgaggcttgttttgtggcctatcatatggtctatcttggagaaagtcccatgtgctgttgaatagaatgtgtattctacagttcttggatgaaatgttctgtatatatctgttaagtccatttgttctaaggtatagtttaaatccattgtttctttgttgacttttctgtcttgatgacctgtctagcgctgtcagtggagtattaaagttccccactcttattgtgttgccatctatctcatttcttagatctattagtacctgttgtatagatttgggagctccggtgttaggtgcatatatggttaggattgtgatgttttccaggacaaggctttttagcattatataatacccctcctccatgtctcttttaactgctgttgctttaaagtttgttttgtctgatataagaacagctacttctgcttttgttttatcacattagcagagctgattttctggttccttctcatttggtaggctctgtcagagggaaggtctagagctgaaggctgttcagattcttttgtcccacagggtgttcccttgatgtagtattctccccctttcctgtgagctgagctgcagtgattgctatctctcttctgggtctagccatccagcaagtctgcccggctctgggctggtactgggggttgtctgcacaaagtcctgtgatgtgaagcatctatgggtctctcagcgatggatgccagcacctgttccagtggaggtggcaggggggtgaaatggactctgtgagcgttcttagctttggtggtttaatgttctgtttttgtgccggttggcctcctgacgggaggtagcgctttcgagagagcatcagctgtgctagtatggagagggaccagcagtgggtgggaccctagaactcccaagagtatatgccctttgtcctcagctaccagaggaggtagggaaggaccatcaatggggggcagggctaggcgtgtctgagctcagactctccgttgggtcttgctgtgctgcggctgctgtagggaatgggggtgaggttcccaggtcaatggagttgtgttcctgggaggattatggctgcctctgctgagtcatgcaggctgtcagggaagtggggcaattcggtagtcacaggcctcacccagctcccacacaatctgaagggccagtctcacttccaccgtgtgcctgctaacggcaccaagtttgtttcctggcagtgggcaagcaaagctgagaacttaccccaggctatccacctcccagatgcaaaagaaaagggctttagttcctccccatcctgtggaggctacacgtcagattcgcgccttcccctgagttctggccaggaggctcttgcccagttcaaattgttaaaaagttcagcttgagacttccttttcctttgcctctgactgccccccgatccctgtggtgacaggcaagaatggcctgcttggggacccagtgagctcccagggcctttcccgctgcctcctctacccctgtatttcgctcagctctctaaattgactctgctccaggtaaggtcagaaacttctcccacaaactagaccttcagtttccccagtgagagtgtgtgtttgggggcagaggatttccctttcctgcttctgcagtttgggcactcccagtatttggggcatctaccaggtcctgcaggagcagtctgcttctttcagagggtctatagattcctggtttattcctgcagtcattctggatctaaaattcatgatgcgagcctccgcacgctgctctgttcttccaagttggagctacagtctagtcctgcctcatgtccaccattatcttttaaaatattgcttctatcccatcctgtatattcttcctttctggaactcagctacagctggtcactgacttatgatagttcaacttacgatttttcaactttataataggcacttacagtatttttgatttaggatgggtttgttgggacataactccatggcaagttgaggagcttctgtgcacatgtgtcaaaaagcccctttcccatgcttatgtgtatggtcttgtgcttttagctctcattccacacctccacctcccactgtgtgtctgtgtgtctgcatgtctgtaagtctgcttcaaacaatattttcttctgaacttatctttcactttatttattctcttttcttgattgcccagtcagctcttaaccatatgcaccgagttcttatttttagttcatctatttttcagttctagactggacttatttttatgtttctcaattcaattccctgccaaaattctttttttttcttctttgagatggagtctcagtctccaggctggagtgcagtgccacaatctcagctcactgcaacctccgtctcccgggttcaagcgattctcctgcctcagcctcccaagtagctgggactacaggcatgtgccaccatgcgcagctaatttttgtatttttagtagagacggggtttcaccatgttggccaggatggtctcgatctcctgacctcatgatccgcctgcctcagcctcccaaggtgctgggattacaggcatgagccactgcacccagcccaaaattctttaacatctaccatattaaatataattattttagactacagtcatgcatcacttaatgatgagatacattctaagaaatgcattgttaggcaacttccccattgtgcaaacatcacagagttcatttacacaaacctagatggtgcagcctactacacacctaggctatatggtatagcctactgttcctaggctacaaacctgtacagcatgttactgcactcagtaccgtaggtaattgtaacacaatactaagtatttgtgcatgtaatcctatataaatatagaaaaggtaatacattgcactagaacattatgtcaccttcaacatcactaggcaataggaatttttcagctccattttaatcttaagggaccactggtaattttaattgggtcttggatattatatattaagattttgagatataattttaggctatgggtgattttattttttttcctgagaaagtgaagtttgcttattttaggcaactggggtgaggacattagtaatccaaggccactttaagccaatcaggtatttaagtaatttgaagctggccttgattccctactatggctagtttgtttttagtttactctcactcttggggtatagcccttcaagttcccagccaaaagcctggggtgttggccaaggtttgttcttcattgagggccctgagtactagtttctatctgcccagatccataagacttgttaaaagctctcttcagctcctcagcctctcagccactgcttttgtcactggcaatattcccaatggggaaagtaactccaaatgctagtttatctctcttgtctctaatcctctcctagttctcagcttaacattcctcactgcctttatactctctgatgtcatcaaacagatctctttcttatattttgccatgtttcctagttattccagtgtcagtattgttgtaaaacaacctactccaccatttccagaagcgaaactccccagggcagtttgaatttgtttactgtgctatcactgataaacacttacttcattgctggaataagcggacagtagtagttttgtgtatgaaaatttttatgaaagaattctaaactgatttatatgatatataatgtcagcattatataactaatcttgaaataaaatgttattacttaactcacacatgaaaaaaagtgtttgtaaatattacccatttaatgcctagagggtatctggttttgccaattgaataaagggctgctgacttccaaaacagaagtcgtgcgttagacagttaatgtgacagatgttgacatcagctttgtagtgttacagtttacacagatgaatttggtgcaggatgtgtaattccattactgtctgacttagtacatatttgcagtatagggatttttttcaacgtcatgaacacagatgatctgctattgtttacattttactagtcatactaaaaaatccagttaactttgttattcatccatttctgactaatttattttaaacaactccaaaagccaccaatactaagaagtgactcccatgttgggaatgtaacatttttcaagctactaactctgtgcacggtcacgtgtgtgttcataacggaggcctctgaaacctacctcagttctgcaccacttcgtctctccctcccctgaggctaaagcatacctgccagagctttgcacatgaagatggtaaaatagttaaacaaagtttcacaacaaccctgcatatctagcaagagttgtttatgtgaaatataggttattctgcatttacactgagctaaaaattgcaagcaaagagcaactatgatggggatgtgaggccacatgcagatcactggatccaaaccagagacattggttgaaggtcatctagctgtttaattttggttgtggtaaattaggtttgtttttaataatgttcttctaaaatggaaactggactccaagagtatacagaaaggcctgttgatgttggcatttgtggtttccccacaggctccagcagaaatggttcactggttagaatgggagctctgtcctttgtcactccctgtccacgggcacagtggcacagtctccccggtggctggagagagggcgtggaaagagcagagtctgctcaggagtagagaggccagcttttgcatgcagcactgtagcgatgtcacaggaatgcagtcactggagttgcttacgtaaccaacagtctgtgtggcctgaggcatagattaagccatttaagaaaatgagtctgaaaaaataactgattgttctctgctttaatcgatttgttccatgattgcaggctacattggaaagtgagcacggaggcgccccctaatggctttgcccaataggaagcccctcacagccagggaagtttccatgctgttagttggagccactccttgccctacccagttaggatgcaggcccagaggccaccaaggagaatcagccgtccacccaccccagagggcccagggtgatgtttcagaggagagaactcaggtgccaaatgcctgtggtcccatgtgaccagatgcgtggccactgtccccagcacacccctgtgtgtccagagtggcccccacattcctttgatgcagggtccttgatgtctgtggctgcgatagagggagccagaatgatggagagcctcaggctgtgcacacataacccaacacacacctgccacacacatgccacataacatatttaccacccattccccctgcacacccacacgcaccgattctacacagcacagagagagtaagttctaactcccacccaaaatgcaaattatctcatcaaaagcaaactaaaatcaaatacaaaagcaaagaaacaaacagctgtggaaggccctactttctcctggcctggccatgcgtcctagccacactgcacccagagcagagcctttgttccgccctgtgcctcccgggctgctctgctcgtcgtgcctcttgcttgtagaagcttctggctccctggtggctcagttagacccggagtctcatgcaggacctcctttccagtccaatagccagtctggactccagggcacagaggtgaggggcacagctttgccacaagccctgagcacacttgcccatcttgttgagcttctcaccccaccctgccctggaagtcctcccctgggctcctgagtgggagccacaggttgtcctctgacccacttctctggccacatgcatgagccagttactaacttaatgcactttatgtaaaggcactgctctagcagctatttgcaagtatttttgtgaagcagctgaatatagttttctttctttttttgttatactttaagctctggggtacatgtgcagaatgtgcagaatgtgcagttgtgttacacaggtatacacgtgccatggtggtttgctgcacccatcaacccgtcatctacattaggtatttctcctaatgctatccctcccttggccccccacccctcaacaggccccgatgtgtgatgttcccctctgtgtgtccatgtgttctcattgttcaactcccacttatgagtgagaaaatgcggtgtttggttttctgttcttgtgttagtttgctgataatgatggtttccggcttcatccatgtccctgcaaaggacatgaactcatccttttgtatggctgcatagtattccatgatgtatatgtgccacattttctttatccagtctatcattggtggacatttgggctggttccaagtctttgctattgtgaatagtgccacaataaacatatgtgtccatgtgtctttatagtagaatgatttataatcctttgggtatatacccagtaatgggattgctgggtcaaatggtatttctagttatagatccttgaggaatcgccacactgtcttccacaatggttgaactaatttacactcccaccaacagtgtaaaagtattcctgtttctccacatcctctccagcatctgttgtttcctgattttttaatgatcgccattctaactggtgtgagatggtatctcattgtggttttgatttgcatttctctaatgagcagtgatgatgagctttttttcatatgtctgttggccacataaatgtcttcttttgagaagtgtctgttcatataatttgcccactttttggtggggttgtttgttttttcttgtaaatttgtataagttctttgtagattctagatattagcccattgttagatggaaagattacaaaaatgttctcccattctgtaggttgcctgttcactctaatgatagtttcttttgctgtgcagaagctgtttagtttaattagatcccatttgtcaattttggcttttgttgccattacttttggtgttttagacctgaagtctttgcccgtgcctatgtcctgaatggtattccctaggttttcttctaggatttttatggttttaggtcttacgtttaagtctttaattcatcttgagttaatttttgtgtaaggtgtaaggaaggggtccagtttcagttttctgcatatggctagccagttttcccaacactatttattaaatagggaatcctttccccattgcttgtttatgtctggtttgtcaaagatcagatggttgtagaagtgtggtgttaacttctgaggtttctgttctcttccattggtctatatatctgttttggtaccagtgccatgctgttttggttattgtagccttgtagtacagtttgaagtcaggtagcgtgatgcccccagctttgttctttttgtttaggattgtcttggctatgtgggctcttttttggttccatatgaagtttaaagtagttttttccaattctgtgaagaaagtcagtggtagcttgatagggatagcattgaatctataaattactttgggcagtatggccattttcatgatattgtttcttcctatccatgagcatggaatgtttttccatttatttgtgtcctctcttattaccttgagcagtggtttgtacttctccttgaagaggtccttcacatcccttgtaagttgtgttactagatattttattcccttagtagcaattgtgaatgggagttcactcatgatttggctattattggtgtataggaatgcttgtgatttttgcacattgattttgtatcccgagatttcgctgaagttacttatcagcttaaggagatttagggctgaaatggtggggttttctaaatatacaatcatgttatctacaaacagagacaatttgacttcctcttttcctatttgaataccctttatttctttctcttgcctgattaccctggctagaacttccaatactatgttgaataggaatggtgaagagggcatccttgtcttgtgctggttttcaaagggaatgcttccagtttttgcccattcagtatgatgttagctctgggtttgtcataaatagctcttaatattttgagatatgttccattgatacctagtttattgagagtttttaccatgaaggggtgttgaattttgtcgaaggccttttctgcatccattgagataatcatgtggtttttgtcattggttctgtttatgtgatgcattacatttcttgatttgcgtatgttgaaccagccttgcatcccagggatgaagcccacttgatcatggtggataagctttttgatgtgctgctggattcggtttgccagtattttattgaggattttttcattgatgttcatcagagatattgccctgaaattttctttttttgttgtgtctttgccaggttttggtatcaggatgatgctggcctcataaaatgagttagagaggactctctctttttctattgattggaatagtttcagaaggaatggtaccagctcctctttgtacctttggtagaattcggctgtgaatctatctgttcctggactttttttggttggtaggctattaattactgcctcaatttcagaacttgttattggtctattcagggatttgacttcttcctggcttagacttgggagggtgtatatgtccaggaatttatccgtttcttctagattttctactttatttgcataggagtgtttatagtattctctggtagtttgtatttctgtgggatcagtggtgatatcccctttatcattttccattgtgtgtatttgagtcttctctcttttcttctttattagtctggctagcggtctattttgttgatcttttcaaaaaactagctcctggattcattgattttttttaaagggttttttgtgtctctatctccttcagttctgctctgatcttagttttttcttgtcttctgctagcttttgaatttgtttgctcttacttctctagttcttttaattgtgatgttagggtgtcgattttagatctttcctgctttctcttgtgggcatttagtgctataaatttccctctacacactgcattaaatgtgtcccagagattctggtacgttgcgtctgttctcattggtttcaaaggacatctttatgtctgccttcatttcattatttacccaggagtcattcaggagcaggttgttcagtttccatgttgttgtgcagttttgggtgagtttcttaatcctgagttctaatttgattgcactgtagtatgagagactgtttgttatgatttccattgttttgcatttgctgaggagtgttttacttccaattatgtggtcagttttagaaaaagtgcgatgtggtgccgagaagaatgtatattctgtcgatttggggtggagagttctgtatgtgtctattaggtctgcttggtccggagctgagttcaagtcctgaatgtccttgttaattttctgtctcagtgatctgtctaatattggcagtgggttgttaaggtctcccactgttattgtgtgggagtctgagtctctttgtaggtctctaagaacttgctttgtgaatctgagtgctcctgtattaggtgcatatatatttaggatagttagctcttcttgttgccttgatcactttaccactatgtaatgcccttctttgtctcttttgatctttgttggtttaaagtctgttttatcagagactaggattgcaacccctgcttttttttgctttccatttgttgataaatattcctccatccctttattttgagtctgtgtgtgtctttgcatgtgagatgggtcttctgaatacagcacactgatgggtcttgactctttatccaatttgccagcctgtgtcttttaattagggcatttagcccatttacatttaaagttcatattgttatgtgtgaatttgatcctgtcattatgatgctagctggttattttgctcgttggttgctgcagtttcttcatagtgttgatggtctttacaatttggtatgtttttgcagtggctggtaccggctgttcctttccatgtttagtgcttccttcaggagctcttgtaaggcaggcctggtggtcacaaaatctctcagcatttgcctgtctgtaaaggattttatttctccttcacttatgaagcttagttgggctggatatgaaattctgggttgtgttgagtagggtttctgcagaaagatccactgttagtctgatgggcttccctttgtgggtaacctggcctttctctctggctgcccttaacagtttttcctgcatttcaaccttggtgaatctgacgattatgtatcttgggattatgtgtcttggggatgctcttctcgaggagtatctttgtggtgttctctgtatttcctgaatttgaatgttggcctgccttgctaggttggggaagttctcctagataatatcctgaagagtgttttccatcttggttccattctccccatcactttcaggtatatcagtcaaatgtagatttggtcttttcacataaccccatatttcttggaggctttgttcattccttttcattcttttttctctaatcctgtcttcttgctttatttcattaatttgatcttcaatctctgatatcctttcttccgcttgatcgactcggctattgatatttgtgtatgcttcacgaagttcttgtgctgtgtttttcaactccatcaggtcatttatgttcttctctaaaccagttattctagttagcaattcgtctaaccttttttcaaggttcttagcttccttgcattgggttagaatatgttcctttagctcagaggggtttgttattacccactttctgaagcctacctctgtcaatttgccaaactcattctctgtccagttttgttcccttgctggcgaggagttgtgatcctttggaggagaagaggcgttctggtttttggaattttcagcctttttgcgctggtttctccccatcttcatggatttatctacctttggtctttgatgttggtgacctttggatgggatctctgagtgaatgtgctattcctttctgtttgttagttttccttctgacagtcaggcccctctgctgcaggcctgctggagtttgctggaggtccactccagaccctgtttgcctgggtattaccagcagaggctgcagaatagcaaagattgctgcctgttctttcctttggaagcttcctcccagaggggcatccaccagatgccagccagagctctcctgtatgaggtgtctgttggcccctcctgggaggtgtctcccagtcaggatacacaggggtcagggacccacttgaagaggcagtctgacccttagcagaactcaaacgctgtgctgggaggtccactgctctcttcagagccgtcaggcagggatatttaagtctgctgaagctgcgcccacagccaccccttcccccaggtgctctgtcccagggagatgggagttttatctataagtccctgactggggctgctgcctttttttttagagatgccctgcccagagaggaggagtccagaggcagtctggccacggcggccttgctgagctgtgatgggctccacccagttcgaacttccctgcggctttgtttacactgtgagggtaaaaccacctactcaagcctcagcaatggcagacgcccctccccctaccaagctcaagtgccccaggtcgacctcagactgctgtgctagcagcgagaatttcaagccagtgcatcttagtttgctgggctccatgggggtgggacccactgagccagaccacttggcttcctgacttcagccccatctccaggagagtgaactgttctgtctctctggtgttccaggcaccactggggtatggaaaaaaaaacctcctgcaactagtttggtgtctgcctgaacggctgcccagttttgtgcttgaaacccagggccctggtgacataggcactggaaggaatctcctggtctgcaggttgcaaagaccatgggaaaagtgcagtatctgggccggagtgtgcatagttcctcaggctcagtccctcacggcttcccttgggtaggggagagaattccccgaccccttgtacttcctgggtgaggcgacgccctgccctgcttcggctcgccctctgtgggctgcacccactgtccaaccagtcccaatgagatgaacctgtacctcagttggaaatgcagaaatcacctgccttctgcgtcgatctcactgggaactgcacactggagttgttcttattcaaccatcttgccatcaatctgaatatagttttcaactgaaatcttagggcgtgcccacatgtcaaataggtggaacttcgctggctgactgcgagcggagagccagagcctcccctaacctaggggcaacatcaccaccacagaactcccaggctctcccggaccaggctcccttggccatcatataaacctccagggccactcagcccatctcagccctggccacaggggactggaaacacgctgctcttcctgtctgaaaactcgaaagttcccactgcttttactcacacccacagccggtcatcagaaatcctgctggctcccctcagaagcccagcagcccctctatgggggtccacagcccaggctctatgccccttgccttgcccactgcttctacttttcagacagcagccagagccaaatataaaatagaagtcattcagtttctccaaaaacaagaagggctgggcagggtggggtactgctggaagctgattggggttgtactgaatctctgaggacctaggggaggacagtcctccagaagagagctggagggcttgcaggccctgacttccagctaaagtgattgggtaatatgagcatacacagagaccgtgtatcccagaacaggatggagtccagagagaggcctgcaccaagggcaaggggaagaaaggaaagtcttttcaacaaaggtgctgaaacaactgtaaaatggtatgttaaaaaaaaaaaaaggagggccttgacgctctgcctcctaccatgcatacgaattacttcaaggcaggttaggcctaaatgtaaaaacaaaacctaaaaagcttctagaagaaggcatggagggaaaatcttcatgaacttggagttggcaaacatgttttagagaggccaaaaaagggctatggaaaggaagacaaatgatgaattgaatttcaccaaaacaaaaaattttggttcatcaaaagacacttaaaataaataggctgggtacagtggctcacacctataatcccagcactttcagaggccaaggccggcagattacttgagcttaggaattccagaccagcctgggcaacatggcaaaactctgtctctacaaaaaaaagaaaaaaaactagccaggtatgatagcatgcacctgtggtcccagctacttgggaggctgaggcaggaggattacttgagcccgggaagcagaggtttcagtgagctaagatcatgccactgcactccagcctgggtaatagagtaaaaccatgtcttaataaataaaataaaataaataggtaagccacaaactgggaaataatattcataaaacatgtatctgatagagcacttgtatctagaatgaataaattacaaccacaaattaattataaaaatacaaacaatagaaaagtgagcaaaagacttaaaaacagaaaagaagaagatacatgaattaccagtaagcacatgaggaaattttcatattagtcatcaggcaaatagaaattagaaccacaatgagatatcactgcacacccaccaaaacaaaaaaaaattaagaatgctgacaatacgaagtattagaatgatgtggaaaaatagaactttccaatgttacaaaggcaaaataataaaaccactttgggaaacagtttggtggtttcttacaaaattaaaaatacatttaagcccttaacccagcaattctactcttggatattaactaaagaaaaatgaaaacatatgtccacaaaaagacttactggaatgttcgtagcagctttacttataatcacacaaacctagaagtaacgcacatatccctcagcgagtgaataggtgaattcactgcagcgcatccgcacagtagatagtactcaatggttaaaagcagtgaactactgatgcatgctgcaacacagatgaaactagagaccttattctgagcacaccaggagagacacggaagacacttactgcatgattccatttatatggagctcaagagcacaggggccatgtagaagacaagattctacagatgtccctcaagattcctgttccctgacattcagccaaacactgctctggttaccactgcgaagggactttgcagatggaattcaggtcgctaatcaggtgactttaaaatagattatcctggattatctaggtgggcccaaggtaatatcaagggcttttagaagcaaaagaggaagacacagggccctgagagaagaggaagaagaggtcaccgagacttgaagtataaaggggactccatcagtcattgctggcttggggatggagaaaggggccacaagccaaggaacataggtggtgtctggacactgacagtgacctccagctgacagcctgcaaggaaacagggactcagtgctacagccagccacctggaacagggtcctggcacacctgaaggaggctggaagccaattctctttcaagcctccaggagggaccacggctctgctgacacctcttcagccttgtaagactcagagcagagaagccagctgagcctactggacatccagcctacaaaactgtgagatagtaaatttgcactgttttaagctactatgtgtgtgatactttgtaggaaatgatgccagagggattggctgggaggggcatggggccatctgatgtgatgaacttgatgtagccgtgatctacttgatcatgctagtggttacagtgatgtgcacacttgaagaagttcacccagctgggcacagctctgggcattcattctaccatgtacaaattatccagacataaaagagaataaaaccctgtcatttgcagcaacgtgtgtggaactggaggtaattgtgtaagtgaaacaagccaagcacagaaagatacattttaaaacttttaattaaatgaaagactgtgagaacatttctgcagctaagaatctgccaatggtctggtctcttccaaggtaaaatcttgcgtccttaccatggccccatgctgcacactccaggcacaggcttccctgtccaactcatcgatagactctacagccacacaggcccagggcacagtttgaccgtgatgttctaatgaccaagaatgctgccctccaaatagccacatcactcccttcctcatttcttcagatgtctgtcctgaagtcatcttattagggaactgtttggtgcctgagtattaaaacagcacacagtaggtgccccctgaatctctgatgaatgcttgaacatggttcctgggtggacacagtccccctgatgcatgcaggtcactgagggatgcagtctcctgggaagacaagtgctcctgggtggacagggcctcccagccctcaggctcacacagcacagtgggttctgcacctgcacccatccctgtcaccaccctcatctgcttctcctgggtacccagccttctgcaccaggcaacctgggaagagcggggcaggcactgctcacccaaattctgatccctccatgagtgggggctcattattttgtagacatagagatccagcaggatttcattgaatctgaacaagcaggaaatttcctaggacaagcagcctttttctgtcatttgtgtaggctggttggccacccacgccagctctctaactgtgctctgggcttgatgacctggccagggtgtgaggcctggaccctggtggcttgcagcagactccactgctaaccctggcatacacagacactgtgggaaggaagcgagtggacttcctggtaaaataagatggaaagagctagaaggctttctttagaagtgacaaattaagctcctcctggaagccagattggaaaacactcaagagacatgaagtgatttatttctcatgtctttgggatttagttttatttcagttttaaaaaggtgcctcgggaatttttaactgaaacgatttaactgaaaggaatggatttctttcttaagtaccgtgcagatctcagaaccagggtgcagagtgcctggtaaatcccacatgagaaggctgctgtcactctcagcaagcatactttaatttttaggactgaattcattttgacagttggcttcactgtctttgatatttttatgaaaatcagtatttcaattcctttttaagaaccattttaaggttaaaggccaggagaccttactttggtgaatgaagttaacggtgttgctgatttcagtaagtagctttttaggctgtctagaaagatgattgggctcagtgagaagattgacttgcaagttaactctggctttctgcagcatgacgttttattccaacaggttcccacctgcactgaggcaatagtagaaacactgttgcttacacatcgggggaatggcagagagtggggctgagtagaaatgaatatagccactgaattcatttatttctctttaaaatcaacttatatgttttttaaaaattcatctgacactttgaaatgaaattatatattttctaaaagtcccccccgctggactatcattttggtcctctctggtcccgccctacagcccagccccgctgacctcctgttgtatacatgagccagaggtggcctccatgtcctggcccctaggctggtggacccattcactgcagacccatttgctgaaagtctgcccgccccaaattcaagtttttacatatccagttgttttaaacataggccaattataagcagagttttcgccacggagagcctgccagctttgcatccagcatgaaacctccccagcatccactgcccactggtaagatagagccttgtgtctataaagccccgagatgctgctgccctcagagctctgaccccgagaccccacttctgagtgacatcacctgggcacgtgtctcagtctaggctctctggtgaaacagaaccaataggagatgtaggtcctgtgtgcagtcatgtgccacataatgactttgaagtcaatgatcgactgcatattccatggtggtcccataaggttacagtggagctgaaaaattcctatcaccgaatgacattgtagctgtcatgtatttgcagggatgctgcaaataaatctactgtgctgccatttgtataaaagtctagcacatacaactatgtacagtacataatacttgataacaaatgactatgtaatgggtttatgtatttactatgctatactttttatcatcattttagagtgcatgccttctatatatatatatatacatatatatatacacgtgtatatatacatatatatatatatatatatatatatatatattttttttttttttttttttttttttgagacagagccttgctctgtcacccaggctggagcgcaggggcacgatctcggctcactgcaagcgccgcctcctgggttcacgccattctcctgcctcagccttgcaagtagctgggactacaggcgctcatcaccaagcatggctaattttttgtatttttagtagagatggggtttcaccatgttagccaggatgttctcgatctcctgacctcgtgatctgcccgcctcagcctcccaaaatgctgggattacaggcgtgagccaccgcgcggccctacttatatatttttttaaagttaatgtaaaatggcctcaggcaggtccttcaggaagtgttccagaagaagacattgttataagagatggcagctccatgcatgtcactgcccctgaagacctaccagtgggacaggatgtggaggtggagacactgatacggatgatcctgaccctgtgtgggcctaggctaagaaaaaatgtttaattttttttttaaaaaaagattatagaataaggatataaagaaagaaaatatttttgtgctgttgtacatatgtttgtattttagtctaagtgttagtaacactttgtaatacaggagtcaaaaagttttaaaaatttataaaataaagtaagctaagtttaatgtattgttgagaaagaaaaaattaaattagtatagcctacttgtacagtgtttctgaagtctacagtagtgtacagtaatgtcctggccttcacattcactcacctctcactcactgactcatccagggtaactcccagtcctgtaagctccattcatggtaagtgccctgtgcaggtgtaccattttttattttttataccatatttttactgtacttttttatttttagacatgtttagatgcacaaatacttaccattatgttacagttgcctacagtattcagtacagttatatgctgtgcaggtttgtagcctaggagcagtaggctgtacacagagcctaggtgtgtagtagtctatgccatctaggtttgtgtaagtgccttggtgatgttcgttcgcacaatgatgaaatcgcctagtgatgcatttctcagtaggtatttccattgttaagtggcacatgaatgtgcagtatgcacacatatccatacatgtttgtgtgtgagtgtgcatgtacatgtatattatagagagagtgggggagagagacagacctattataaggaattgacccatgaggttatggaagctgagaagtctcacgacctgcagtcagcatgctggagaactgggagagctgggggtgtaagttccagctgagtccaaggccagctcgatgacagtcaggcagagagagtgagtttcctcttatttagccttttgttctactcagcccttccgtggattagatgaggcccatccatgttggggagggcaatgtgcgttgcccagtttacaaatcaaaattaaatgttcatctcatccagaaataccctcacagatacacctcgagtaatgtctgagcaaatgtcttgtctaggtaagctcctgctctgaggatgtgccccttccccatgtatccgctgcagaccactccaagctctcccagttaagcttgtgcatgccgctgcctgcttgtggtctcatctcttttccttgttaagccaccaaatctctcaaactcccaacacctctatgcagatggtggttttgcaagcctctgagcctttctatgttctatgccccatattgccctccctcttcctctcccgggaagcttccactcctcgctcacaaatagcaggatgtgtcagcccttgtgcagaccccctggctcctctgcaatacctctcagtcatcccagtccatgacagttgttcccatgtctgtcttacctcttactctgttagcctcttaagaagcacatacgcatctttattcatatccatgctatcagcacccaaggatgcctgcacgtacagggagcctcgtgggggtatgctcagtgaatccatggccacaagccagccagccttccctaaggcacagcatggagcacttccttttctgtagctataggctgttcagtttagctatttcttcagctgccatgaaaacgcttttaccatatatttgcatcattgtttagattaattgtattctgagtacagagaacccaagcatctggaaatacttaagaattcactttgtttataagatatggagtgtgtgaagcccaaaagtagaatttatcaggctgtaagtacatattcttttatctattcatacaacaataagataatttcgtctgtggaataagtcaacaatgaattaatgcctgctatgtatgtatgtgtgtgtgtaaggtatttccatcacgtgatgaatgatgatatatgtgtgtttaatttattattgtatatgtgtatatacacatacaccaaattacactatgcacatactatatacatacacacatatacaataataaacacacacatatatagtcattcatcactgaatgacagaaataccttatgagacatgtgattggtaatttcatcattgcacaaatattaaagttcacttccatgaagtagatggcatagcctactacatacctaggctctaggctataacctattgatcgtaagctacaaaactataggcaattgtaacacagtggtgagtatttgtatatctaaacatagaaaaggtatgtgttgcactatgaagttacaaaagctgtgatgtcactaggtaataggaatttttcagctccactatactcttgtgagaataccattgtatgtggtctgtcattgacggaattgtcatatagcacatgatggtgtgtgtatgtatgtgtgtgtataattataacttgctcttctttcactcagttgatatatatataaccaaattgaaaggtttttttcccaaaattattatccttttatcataagaatatactaattatattttacattaccatgagattgatagtttcaatactaatcttacagagtaacacaaaatagttatcattcagtactaaaactgaatgatttacttttctacattatttagccagttgtttgaaatagttgagtacacaatttagtttagcttttggatgtctgcatattcattaaaaataaccaaaaggagccagttagttacccaaacaatcacatccgccaggcatttaggtaaactgaggccctgaggatattagtataaattcattgaaaaaatgcaaacaaaatgagaaaatacaggtgggcatggtagctcacacctgtaatcccagcattttgggaggccgaggtaggcagatcccttgagcccaggagttggagactagcctaggcaacatggcaaaaccccgtctctacagaaaaaaaaaaaaaaaaaacaagcccaggacagtggacacctgtagtcccagctactcgggaggctaaggtgggaggattgcttgaacctgggaggcagaggttgcagtgagccaagatcatgtcactacacgccagcctgtgtgacagagtaagaccctgtctcaaaaaaaaaaaaaacccagaaaaacaaaatgagaaaataaaagtcactcctgatcctactctttaaagagaatcccaaggctattttgatatctcttctttcagttctccatacacatatccatatacacacgtgtgtgtagatgtaatatgcgtgtatgtatatgtatacatacacaggatttgtagcatacatctttttcaaatgtttgaggtagaagcaactagctgtttccaaaacccatctttccttctgcctaagcaggctacgaggcctcatgtcccagtctcccttgcacttcaatgtggccatgtcacccaccccacagtggaacaacagaaagtgtgccatgtgcccttctaggctggcccatcataggctgcctgaggaggtgaagtttgaggagagtctgcagtgaagccaagaggaagaggccctcctcccctctgagtagcaatccctgccctccaggctgccatagtccctggaaaagcagtctcggctgtgagggacttcccctgtccctgctggttgagtgggctgctgccgcccaggcagccttggaagccacgtgtggaagatggtacctggatccctggatgagtgtgtggagcggaaccatcagaggcctggactccaccctggactgctgtgtgcagaaaggaataggccttttgtgtttaagctcctgatgggaggcaggaggctctactgattgccacagtttaacctaccctgattcattatttctgttaaatattgaggtggtacaaaattaatttatcagaattcattatgaaaatacccagcttagaaagggtgaggggcatggaatttgtcattaactttgaaatccctttgtgtttcttgctaacccatcatgttgcctccccctgggaaacgaccactcacctgaagtttgtgtttacctttcccttgctttcccttagcgtgttgccatgcatgtctgcacctgtagtcaatatgttgcttagtattgcaagctttggccttcaaataaatggagccagactgcatgaatatttaggaactttctcctttcctacaacaagatattcctgagactcctctgtattgttgtatggaattaaattgctttttcattgccacatagcattccattgtttgaataaaccaaatgtatttgttcattctacttttgatgaacatttgacttgtttctcttttgtgctgttatgaacagggctgctgtatgcatctttagtggctctatgtgcatatggcagatgtacgggcatttctgtagggattataccaacaagtgggattgctggatgccaggacacagggtattttagataaaaaggtcagggagagcctttctgatgaggtgatagctcaggagagaccacaatgaagtgagggagaaagagtgcagatattttgagaatgcataatccaagcagaaggaacagtgagcgttagggccctatggcagaaagccctggcccaggtcagagtggctggagcccaaagagggacagcaggcgaagtcacttggtgcccggggccagattgccaagggcctggaggccatggggaagactccgaagttatttggaaagtgattgaaagtccctggggtttcaaaggagaggaacatgataagatttacattttctttttttttttttttgaaatggagtctcagtctgtttcccaggctggagtgcagtggcacaatctcagctcactgcaacctctccccctgggttcaagcaattctcctgcctcagcctcccgagtagctgggattacagacgcctgccaccacacctggctaatttttgtattttttttttagtagagacggggtttcaccatcttggccaggctggtcttgaactcctgacctcgtgatccacctgcctcagcctcccagagtgctgggattacaggcgtgagccaccgcgcccggccaagatttacattttcaaagggccactctggctgtcctgtggagaacaggtgacagggcacactggggtggaagtaaggagaggaaccagaagcctctggcaataatccaagcaagagatgcagccaacctagggtggcaatggtagagattttgattatgattagatcaagaatgcatattttaaggtgaagctgcaaggacttgctgatgtcgggtgtgagggtaagaacagagtcaagcatgatgcatggatctttggcttaggctgtgttaggcttgggatgctcttagatagccgagcagaggtgttgagtcaggagctggatgtgtgagtcaagagttagcctgaggacaaaactccaggagtcatcagtatttagatggcactcacagcgagcagccctggcgggcaatgtgggtggagaagagcagtggtcctggggctggagcccttcagcaagcagaggccaggaggaggaggaggacccagcaggggagacccagctgagcagtagtggagagggggcaagccaagggaatgtggcatcccagatgccaagaagaacatggctaagggagtggctagctctcagtgttcctggggttggcaaagtgcaggccatcagtgctagggacatgggtggtgtaaggggagtggtgggagtcggggaatgagaggaaaatgaggagagtgggccaatcgtgttgtttttaactttcagactcttcagacttacactgccccttagagatgaatctcaaccatctctccttaacattgccaaaactgggactcaaagaggaggcagaagttgcccaaagtcacaaggcaagctcacagcagggctgtggccaaaatctggcccctgacactccccgctcttctgactcccacccctgagtgaatgcctgtggtacccacagccctggggggctgctgtgcagaaaaccctaccctcagtccttctaggacttgctatctaacacaccatagccatgttgtaaattgataggtatgtgagctattcacactgtatgtatggaatttagactttcatttaaattcagggtaaattcatttaaagaaattgactataaaagctgaggctaagcctcccacccaccacatctgcgctgtctgcagagtctttatgttctgcctgcatttcccttctttggtcattctatcctggaggaaagaaaccagataaatggattcactcctagagtaataggaagggttaatagtaatcgtaactggcaggagcctttctccatagggtgaaccagcgtagcctcaccttcagaattcctgctgagggaccatcctgaccctacctgcctttcttctattttaatgtatacatttatattcacatgcatatgtcattttgcatgaatggtatcataacatatatatcatttgtttctagaaaaagtcttctttgttgcttggctcatcccaatccctccttcctctctctattgatgtcattacaactcccggaaacccatgtgagcaagctagtatgtgttcttccatatttttctccaagctcaaatagtggtctgtagacacctatgtacatatacatctttatgtatacacatatatgtatacacatatgaatacagccggggctctttctggagcacataagaatctggaggttgcaagtgagaaggattttcagaccaccacttagaggcttgcaccccagctggaagggtagaggagtgaagggcagggaagccgcagatagaaacacataactcaaaggtcaagctctcaaccctggggatgccgggtggggacgcactgtgctgtcacagcctactgccccagagcaccgaagcagctcacctgtaggtattctcctgggtgcagcatgactcacaggcagagccactgtcaccatctgggctgctgaggatgagattccccagagctgggccagaagctgtctgtttctgctcgcagctaacctcagtattcgaagacttctcctgctgccttccacgcctcgcatgaatgtttgtcatttgagaacctagagcttgtctggaaagcagttctgggaagtgccattccaggctgttcccaaattacgcagaggagaatgaagggaggggaaaggttgagcacaggctctccagcaccatccaccccttttgtcaaatcctcacccatccatatcctttggcccatatctaaccagcaagcaacagcagtaacatcgtgccctgctaattttactcttcttcattccactggaaatgtgcatgcatctcaccaacaaagggaggcgcaatgtcctccaagtcaccaaacccatcttgagttttgttcatttgccatctagctcactcacaacccatttgtgataaactataccttaaagactgaattaagagtttaatttctcctcatcaataggtcttatggcatatgacaaggaagcaagagggcacataggatttctatactccactagataaatcaccaaaccggagagaaataggcaggccatcatgatcttgaacactgcaccttgcagactccagctgacgtgtctgtgacccttttccactgcatctattgggcaccccttgtctgcagcaagcacccagactttcatatccaaagagctcagcattagttgctgctggtgacatgttcctatgtactttcttcagatttctactggcaacaatcttgcgattctttggatgtgtatggtatatcctcccaggctgtcttcgtagttaagaatctgattccaaaacaagctgggttttaaggtgacgtaggcatccccctgtaacttgtctgctcaggcaaggtcattagcaggtcttcagacaaggagaagcttctctcagtcaagtgagcagaggctgctttgttgagcccagggcgggtcagttgatgttgatgttggatttcaaggccctctggtttgtcaaaaaccacttaagtgttctcaggatcccatccagctccaaagccccagtcttgtgatcactgccatactatgttcttaggaggtctagcaaggctttcaattaaacttgtgtaattcatcagtgtgcagtgtcagaaaggtctggctctttggatcaatgcctccatggctataagagctaagaggttccttaaaggaactgggagctgtgactccacagctatacctggagctgagaattaaagcttcccttgtgttcctgttgctctctagataagtcatgaagggtcagcccaccctgctgtctttgtgctctttcttttcatcagagttgtcaatctataccagctgttgatttgcctgcactgacagagacctcatctcatctctgtgctctgttttcctggaaccatttccagtatgaaattctgtatccatcaacatttgcttaaggagacagaagctgttctaggtattccaagtaggaaggggaactagaggtttacacaaccagtgcaactgcatgaaatcagagaagcgttgctaactacgggaggttcagcagggttccctggaggtcatggacacctcatgagtcccagggagcatcacacagtccattttcacactgctgataaagacatatctgagactgggtaatttataaagaaaaagaagtttaatggactcacagttccacatggctggggaggcctcacaatcatggtggaaggcaaaagtcatgtcttacatggtggcaggcaagagagagaatgagaaccaagcagaaggggcttcccctgataaaaccaccaaatctcatgagacttattcactaccatgagaacagtatgggggaaaccacccccatgattcaattgtctcccactggctccttcctacaacgtacgggaattatgggagctacaattcaagatgagatttgggtggggacacagccaaaccatatcagcatctctgccactacccttctcagtggcctggatttacaaagcaggtgcttcacaggagcttccctggcagctgcagcaaatctcatgtctgcctctgccatgcatctgtgcaactgcatccatagaaaagtggcctggcttcatcttccaccttgcatgaatgcctcttgctagagactatcactagactgcaccagaaagagagttctgggaaaagtcctgcaagcttctctcctgcagtgctgcagggatggagaaaggcagtggtggtgcagaactgacactgaccttggacagtaaggcacaacatggaccaggcaaggacgctgttgctttattttgccaaactgggttgcattgaacacactttccagcatactgcttttctcactcaacaatccttcactgaaatccctcaaatcatatgtacatgcaacttccttctttttaatgctgattaatactccagatgtggctttcagtaattcagccagccaagtagatcatgaacacttccttttccctcccttctccctccagttggtcaccaagcactgcagattctgccctcattacctctccaaccctccacttcttcatcctcatcatccctcattgacattgctgtggtattgatatggttttgctatgttcccacccaaatctcaccttgaattgtaataattcccatgggtcaagggcagggccaggtggagataattgaatcatgagggcagttttccccatactgttcttgtggtagtgaataagtctcatgagatctgatggttatataaatgagagttcccctacacgagctctcttgcctgctgccatgtaagacttgactttgctcctcattcaccttccaccatgattgtgaggcctccccagcatgtgtaactgtgagccaattaaatctgtttcctctacaaattacccagtctctggtatgtctttattagcaggatgagaacagactaataaattggtagtggtagaatggggtggtgctgtaaagatacctgagaatgtggaagcaactttggaactgggtaacaggcagaggttagaacagtttggagggcttagaagaagacaggaaaatgtgggaaagtttggaacttcctagagacttgctgaatggctttgaccaaaatgctgataattatatggaccataaagttcaggctgaggtggtctcagatagagatgaagaacttgttgctaactggagcgaaggtgactcttgctatgttttagcagagactggtagctttttgcccgtgcactagagatttgtggaagtttgaacttgagagagatgatttagggcatctggcagacgaaatttctgagtagcaaagcattcaagaggtgacttgggtgctcttaaaagcatgttgttttgtgtattcacaaagatatggtttggaataggagcttatgttgaaaagggaagcagagcataacagtttggaaaatttgcagtctgataatgcagtagaaaagaaaaacccattatctggggggaaactcaagccagctgcagaaatttccgtaagtaatgaggcatcacattttaattgccaggacaatggggaaaatgtctccaggcatgtcagtggtcttcacagcagcctctcccatcacaggaggcctggaggcctaagaggaaaaaatggtttcatgggccaggcccagggccttgctgctttgtgcagtctcaaatcccagccatggctaaaaagggcccatgtagagctcaggccactgcttcagagggtgcaagtcccaagccttggcagcttccacatggtgttaagcctgcaggtgcacagaagtcaagaagtgaggtttgggaacctccacctagatttcagaggatgtatggaaatgcatgggtgtccatgcaaaagtttactgcaggagcagaaccctcatggagaacctctgctagtgcagtgtggaagggaaatgtgggatgggagcccctacacagagtccctactggggcactgcccagtggagctgtgagaagagggccaccatcctccagaccccaaaatgatagatccaccaacagcttgcactgtgcacctggaaaagctgtagacactcaatgccagcctgtgaaagcaactaggaggagggctgtaccctgcaaagccacagggtggagctgcccaagaccatgggaacccacctcttgcatcagcataacctggaagtggcatggagtcaaaggagatcattttggagctttaagatttgactgccctgctggattttgaacttgcatggggcctgtagccccttccttttggccaagtgtttacccattgcatgtacccccattgtatctcggaagtaaccaacttgctattgattttacaggctcgtaggtggaagggacttgccttgcctcgagactttggactgtggagttttgagttaatgctaaaatgagttaagactttgggggactgttgggaagggatgataatttttgaaatgtgaggacatgaaatttgggaggggccgggggtggaattatatggtttggctgtgtcctcacccaaatctcaccttgaattgtaataatccccatgtgtcaagggcagggtcaggtagagatagttgaatcatggggacagtttcccccatactgttctcatggtagtaaataagtctcacaagatctgatggttatataaatgtgagttctcctgcacaagctcttgcctgccaccatgtaagacatgactttactcctcattcaccttccaccatgattgtcaggcctccccagccatgtgtaactgtgagtcaattaaacctctttcctttataaattagacagcctttggtatgtctttactagcagcatgagaacagactaatacaggtgtccacctagcattcattttgcaccagtattgcgcaaatgcaaatgcagtctctgctatgcaaccagagtaatttttcttaaatgcaaatactttattttctaaattaaaaatctcatcaagtttcacccctattgaaaatgcctcagtgactcatctttgcctttgaggtcaaatctaaaccccactgtacaattcctgcagggcatctctctcctggcatctcatcctccctgccgccctgctaccatcatcctaaccagacctctcctcctgctgccctccacttcatccacacttaatgacctcagtaccttgaatgtacttgcccattctactttcaggtttatccagacgcaactttctgtccagtaacacccctctccctgctcaccctgctggattctttgccaagacaacttttactcttctttttgatctcagactaaaatgacacttctcccagggagccccttggatcccaaattatagtggttctttcctagatatcctggtggaatctgtacttctacatagcacatagttttcactgccattgtttgttctctgtatttttccctacattatttaggaatgcgttgggctccaagtaatggaaaacacaaaacagtggattgtgtggtacagatatgcacacgtgcactcgcacacataatatatatagtgtgtatgagtgcacatatatactatctagagagagtatatatgtattgaaactgtggattaggggagctattgtatgtgtgtgcatgtgtatacatgtgcatatatacatatatacatacacacatgcacatacatacaatagccccccttatccacggtttcacttttaaaggtttcagttttacctgtggtcaatcacgatctgaaaatactaaatggaaaattccagaaatcataagttttaaatcatgcaccattctgagtagcatgatgaaatctcactctgatgtgaatcatccctttgtccagtgggtccaggctgaacatgtcacccacccgttcatcactaagtggccatctcggttatcagatcagctattctggcatcacagtgcctgtgttcaagtaacccttcttttacttaatagtggccccaaagtacaagaacagtgatactggcaatttggataagacaaagagaagccatagtgtgcttcctttaagtgaaaaggtgaaagttcctgacttaaagaaaaagatattttttattacagtatttgttacaatatactgcacctgcactgtgggcctgctgctttttctgcccaatccccttacaaacttcctgcctcatgttttttcctcagatttttccaggacctgaccttcttcagatacaaacctcttgtatgtgatatgagttgcaaacattttcccaaatcgacaactgtcttttaacattttgtgcatatttgattctctttggggctttttcattgttaacgaaaagagtcaaactctgaaatatttggagagacatttggagccaaatatgagtgaccatggcccatgacacaggtctcggagatcctaataacatgtgcccaaggtggttggggcacagcttggttttacacattttagggagacatgagacatcagtcaaatacatttaagatgtacactggggccaggcacagtggcccatggctgtaatcccagtgctttgggaggccaaggcagcagatcacctgaggtcaggagtttgagaccagcctgaccaacatggggaaaccccacctctactaaaaatacaaaaagtagctgggcgtagtggcaggcgcctgtagtcccagctacttgggaggctgaagcaggagaattgcttgaacctgggaggcagagattgcagtgagctgaaattgcaccacggcactccagcctgggtgacaaagtgagactctgtctcaaaaaaaaaaaaaggacattggtttggtctggaaatgtgaaacagtgcaaagtgggggcttccagattataggtagatttaaaatttttctaattggcagttggttgaaagagttattaatagaaaggaatgtctggtttgtgataaagaggttgttgagaccaaagttttattatgcagatgaagccttcaggtagcaggcttcagagagaatagattttaaatgtttcttatcagacttaagtccaattagatgttaaatgctggatgttaaatgtggatgttaaatgctggtcagcttttaaatgctggatattaaatgtggatatttaaatgttaaatgctggatgttaaatgctggtcagcttttcctgcattccaaaaaagaggagggcataatgaggcctgtctgactcctacttcccaccttggcctgaaccagtctttcaggttaaattttagggtaccctggccaaggagggagcctatttagatggttgtcggggggccttcaaattttatttttggtttacactattatgttccattgttgagtctgatcagagactagtcattgaggcagtagagttcatgccagtgtctcagagtgctccttccttctctttgtacttacttttcagagtttctctggttattcttgcttattttttgatgtgaatttaaaatcagcttgtccgattccaaggaaggaaaacaaaacctgcttctgtgttgtttttttttttttttactggaatcaaatcaaatgtataagttagaggaataaattacaacattaagtctcctaaactaggaacatagtattgttgatggaaaaaccaaattctgtaaaatatatatatattttttgagacggagtcttgctctgtcgcccttctgagccagtacgaatgaccatgacccagggaacagtcttaagagatcctgagaacaagcgcccaaggtgatcaggttacagttttgttttatacattttagggagacagaagttacaagcaaagacatggatcaatacatgtaaggtatacattggttcagcttaaaaaggtgggacgtctcaaagatgcttagaaaggcaaggagtggggatggtcacaggtcataggtggattcagagagattttctaattggcaatttgttgaaagagttcagctttgcctaaagatttgaagtcagtagaaagaaatgcttgagttaagataaggggattgtggaagccgaggctcttgttttgtagaggaagtctccagctagcagccttcagagagaatacatcgcaaatgtttcagaccttacaacgtgtcagactcttagttaatctttcctgaatccaggaaagtgctagctgcgttaatggagagtctctacagatgcaaatttcccccacaaagatagctttgcagagccatttaaaaatatttcaaagaaatatattttggagtaaaatatatttgatttcctttagagtctgctatctgtcatgtgatgcttaccagagtcaggttggaatttggtatctcattgctacacagtctgtttggtgatctctattttatgatctctattttaatgttaatgctggtctgttgtgtctaaactccaaaagaaaggcggtattacaaggtgtgtctgacctcccttccagccatgtccaggaattcagtttttcaggcatctctgaggtcctcttggcccagagagggttcatttggttagttggtggggattaggattttattttcagtttacgatatacacagtttaacttttatgcccttcaggaatattctaagttttccacatttatgttgttgttgacaaaaagattcaagctctgtaagacatttgaagatatttattctgagccaaatatgagtgaccaatggtccatgacatagccctcaggagatcctgagtgcatgtacccaaggtggtcagggcacagtggggttttatacactttagggagacatgagacatcaatcaatatgtgtaagacgtacatttgttttgtctgggaaggtgggacaacttgacctgggggcttccaggtcataggtagataagagataaaagtttgcattcttttatgtctttgatcagcctttcactgaatacacaatttacatgtgagaggcaggtagaggaataatcacttatgccttagtctgactcagtaaatctgaatttttacataaacaatagggcagaggaagcaaccagatatgcatttgtctcaggtgagcagagagatgacttagagttctgtctgtcctttgtcccacacctgtgggataagctatcaatttacattgccagggtaaaatgccacagaactgttttagggctctgagtccctaaagaaagatcttgaggcccataaggaatttcctggtgagcaaattgtgagggaggtatgtagtgttttttatctttttagctatcttatttaggaataaaatgggaggcaggtttgcctgacaccctttggcttagtgattttggggtcttgagatttatttttctttcacattgtgtacatttcttttaaatatatccctcagtactttatcattttagttgcaattgtgtatggaatattcttccattatgtcttctaacatgtttttcttcacagattaaggctatttatttatgtgtgttcatttcacatcccgtgtattcagcactaatgcccttcacggactatgtccagctctctgcctcccgcttgtgggcacatgggaggatgtagttcctgggccccgtgtttggagggagcctgtggctagttcttgccatggattgtaacagaggtgagatatcacctctggaccagagtatttgatttttgatgggagatgctcctggctttttatccttcttccacagtcataggcttatagtggctgctctataagcctgaatcctggaatgacaagctatgtcacagagttcagtcaacccatggtggatgtgtggaacaagcaaaaagtaaacctgtgttgttatgacctctaggatttggaggctgtttgttaccatgttatagtcactcctgctgtttatggtacgctctaggtaattgtggtgtcagtgtagtgtgtttcatggtagtttccactttataaagtttctgccttttaatttcctatgcagatattcatacctcttatatcttctgttttcatatgtactttggatttgttttaatcaggtatgcagatatggaaattattgttataaaggaagaagtttgttactcacaattccctggaagcagggtgtacaacataccacacagggctacatggggaagccctgtttctgtatttctgttttaggttggctacttgacttatttttcatttttatcattcctactgtgctatctgtagtctgttttctcttttctcccttataatttaacttcatttctaaaacagtttgactccttttcccccctgagtttaatcagtttctgtttcacagtcaggaggcagagtgagtaggaggaaaaccagagcaagagcctttgttgcagtttccatgggaaggattgggcagggcacggcaagcaggctaagctggttgagggttggctagtctgagtaattccagcaggcccaaagtggaggggctgtcctgagttatctggtacctggccctgggctgattagaggaggggaatattggcctgcagtgtaggaaaggctgtggttgaggggtctgggctttggattaatgggtttatatatgaaaggcaggcttgcagaaaagtagtttgtcatctctaggaatttgctagcccaaggagatgcagcttctcccaggtcacaaaggccccaagatgtcaaagcgtcataaaatacaaagaataaaaaacatgattaatatacttcattgccaattgaacagttttgccttataaagtggttttcctcatattacttaatgctttttggcctgaattctaccttgtttgatacaagatcataatctcagttttgttgttactgttgttttgtctttgtcttgtgtacctgataaactattatctatctgttttagttgtgacctttataaatcactttgctctaggtgtgtctcttatatacagcaaatgattcatctttctttttagagataatgtaaaaatccttttctttaaatagttgcattaagcctacttaaatttattgctctcacagatacggttggttttagttctgtcatagtttctatttttctgtgtaaatattttaaatgtctttcactatgttatcttagctttttattttagaatattttttctgatattttaaaaaactatgttaatggttacttttttaaccactagtataacaatacaattatgtttataactagtggttatataagtttgcctttatgtaatatcctatatccctttttctttagacaatatcagtttattccctatatgcctcaataaaacaagcttctatcttcttccttcattctcccctctctcttctaccatctaatttaaccaatagtatatcttttgtctgttcttattgtttgcccttctactattaaatatgcttacatatacatatttgacctgtcaactgtagttttgttttttttgttgttgttatgtttgagacggagtcttgctctgtcgcccaggctggcatgcagtggtgcaatctcagctcactgcaacctccacctcccaggttcaagcaatgcttgtacctcagccttctgagcagctgggactacaggcgtgtcccaccatgtccaggtaatttttgtatttttggtagagacagggtttcgccatgttggccaggctagtctcaaactcctgacctcaagtgatctgcctactttggcctcccaaagtactgggattacaggtgtgaaacactgcacctggcctgatctgtcaactgtaaacattatctttgcagtctcatgtataacagctgaggcattgcaaatttattctgctttctaaattctaccatttttgttgattgtgtcattttcattttgacagaatattgatattcttcttcatcacttgtatctctacctttgcttttccttagatgtgcagttaaataaacttactgctgcctgactgctcctttgccagactcttattcatctcttgattggctggagttcatcctctattaattttctcaaaaagtgtccatttgagaaatgttttctgaacgattcatgtttaaaatggtttgtctacagcctttatacagaaaagagtagactggatgggcataaagctttcttagctcatattgctttctttccttcagtatcttgtagatgtggccctattgtcttttggcattgactgttgctgccaagaagtatgttgctaacctgattttctttcttttttgcttacatatttaaaaaattctctttatctttaaaagaggataattttaaaatatgttggtattggctatactagaacagtttccttatatacagtgtgccctttaaatgtgtaaaatcaaatatttcaaaaagtttgcttttttaattaaagtctttaaattctttttttttcctttccattatttcaggttttttatttggggctcaaattatgagtatgttggatttttttacctatactcggtatctaacatttttctttaaccctgtgtttctttatttctgttttgtctactttacttttcatttttatcattcttactatgctatctgcagtctgttttctcttttctcccttataatttaacttcattcctaaaacagtttgactcctttttcccctgagtttagtcagtttctgtttcacctcctcctgtgagttcatgtatatctgatttatagtttttcttcagagctgtgatacttttgtactaaattaaagcagctcatccctctctgagtgccaaaatacatatgttaagtttaacttgaaatccactgcctcttaagacaatgaaaaaaaatcaaatgatttaggagtttaaggcataaacattttcagcagtaaactgtactagaggttgtagttcttaccatgaaatctgtgtctactagtaatccaataacttgctttttggtgataatcagaaattgaggcatcctggaagaaaaacttcacaggaagcttcctcagtctttgaattattttggttaaggtcttcttccatacagctatactgtcttgctgcttggaggaactattcctggaagaagaaacagagtaagcaaatacagaaagataggacaacaggaatacagtttgaagatctgcaggagaaaatgaatattttcagctgtgtgtattgctatccaaaataaattagaattctgaacatatagaattagataaggagactagaaattggatagtcagctaatatctcccatagtcaaatatttggctttaaaacttaggatgtaagttgtaactagaattaagcttattctcatagagatggaattaatcttcaaaggagggtataaattaagagaaaagaagagcaagaagaaaaattaggggaatccatgtgttttaagggcaggaagaggcaaaggaaacagtgaagggaccatagagtgtcccagggtgcagaagaggaagtgtgaaaatatccatgttagaattaggcttctactgccctcccatggactttatggcctcagtgtgtttgggagatggcattagtaacagttgaatgagaaactcacggagtatagataagtccgtgtatttgaatctcagctccgttgcttactagctggcttttaactctgagtgctggaagttaaacataaaacagaaacctataattaatgagaataatggtaactaccatgtattagtgctttccataaaggaagaactttacaaacactatctccttttctcatttaaccctcataagaattctcattagatggattgtgttatcctaattgtacaggaaggaatgcaaggccttgggtgatgaaatgatatattcaccatcagagaattagttagaaggtggaaccagggctcaaaaccaggccctagaacctgtgttcttgactgttcttctgggttgcattccttcatcagggacatgtagcctgtggctgccccagtcttccagcctcaggtttcaccatgggcctctgcgcctttccttctcatccttacttgatgtgacatctgttggggttcccagtaacttaaaatggaaaagatgagaagagagcttatttttatttgctccttaaaattaaggctaagtttttaattctttgatttctttttaaaattttttaatttttaattgttatggatacataatagttgtatgtattgatatatacatacatcaatatgtatattgatggggcagatgtgatattttgataccagcctacaatgtataatgatcaaatctggctaattgggatatccatcacctcaaacatgcatcatttcttttgtgttgggaacattccaaatctacatttctagttattttgaaatatacattaagttattgttaactatagttgcccaatcgtgctataggatgatgcctaactgaatcgggtgtagtgtgtgatactccttcctgccgttacaagcccactgactctcagagtcgggaatcagagtgcccacgctgcctccaactccccagtgtagctgtgcctagtgctgcgaagtgccagtccagcaccccgtgtcggggtgggagccctgctgagtgcgtacccacgctgggcacacctgcccagcctggcatcacacctggtgcagggcctgagctcagaagcctatctcccaccaaagctcactaacaagagaatccctcccaagcttctgcttcgctcatattaagcttaaaataaaaagtaaaactctgagcaaaagcccaaagaaactttgagaattatttcaattcatttttctttaattgatgctttgttcccctcagagagtaagctctacaacttgattttcaaagggggatgtgatgatcagggatgcagtgtttagatgtgtgtgtgtgtgtgtgtgtgtgtgtgtgtgtgtgtgtgtgtgtatgaacctaaaggctctgagactgtatatagtcacatattttagatggacgtcacttatgggtgtgaaattctgcttttagagtcatgcagagggccatttttcccctttgaaaaacaagaactactggtaaaaattcattagtttatgtcctaatgggaaacccttcttgtcacagttcttctctatgatgagaccgttattcatgcgttcgtattgtcacctcttgtcatttcttgtccacaggcaaaaactgggacctgacagccgctctgagcgactatgagcagctccgccaggtgcacacagccaatctgccacatgtgttcaatgaagggcggggtcccaagcagccagagcgagagccacagcccgggcacaaggtggagcgaccctgcctgcagaggcaggacgacattgcccaaggtaccgctgagggactgagcctaggcacagccgcccaggccagtgcaccgcagcttgcaggcgggttgcgtggtacaaagaatggtggggtcatcacctcccggatgcagacatattggcctctcagtgccttctttctcacactatgccgaaatgtcctttgttgcttctatccatggttccaacctctacctcagaaaagcagaaaaatgagtctgatttcctaggaccccaaaagcccaataagtgagtaaaagccagcattcctcctggagtcttggttttttcagaccaaacatctctagttctttcacatatttccaaagtaacacagtctccaagtctgttcagcatcacatttcttgtcccatgcgctccatcttctctatcctttttcttcattatgaaagtaagatatgcttattataacaaaggaaacaatacagagatatatgaggaaaacttaagagcattcgcctccacacctcccagatctcaccagtgtaatgacggctgataacattctggtggtctcctcctgctcctcttgctatattgttcaaaatcaaacacatcagagtcaaatgcacagcacactgcaaagtgcttgtttcactgagcaggagatgatgaacataatctctcaatagctacattttattctataatgtgttaatttttagatcactgctgtattcatggtgattctgtttttgcttgggtttttgtcgttgttattatttgttaattgccactgaaagcaatgctgaaagaaacatctttatacctctaatcttacatactggtgcttttgtttctatgggtttgcattcccagaatggatttgctgtgccaacacatgtgtgtttctagcttaataattttagggcttctttcctaatatattgctactcaccatgtgtgaaaccgggtgtttcccttcaatcttgccagcactggaaattacaatgtatggtgtgctgggccattctttcactgctgtaaagaaatacctaaggttgggtaatttattttaaaaagaggatttcttggctcgtggttctgcaggctttacaggaagtatggtgctggcatctgctcagcttctggggaggcctcaggaagcttacaatcatgcagaaggcaaagggggaacaggcacttcacatggccagggtaggagcaggagagagtgagttggaaggcagaggtgctgcatacttttaaatgatcagatctcatgtgaactcagaatgagagctcacttatcaccaaggggttggcccgagccattcatgagggatctgcccccgtgatccaaacacctcccactaggccttacctccaagatggcggattgcatttcaatatgagatttgggtggtgacaaatatccaaactatatcaatccactcctgggccctcccaaatctcatgtccttctcattgcaaaatacaatcatgccttcccaacagtccctcaaagtcttgacttgttccagcattaactcaaaagtccaaactcttgtctgagtcaaggcaagtcccttccacctgtgagcctgtaaaatcaaaaacaagttattcactcccaagatacaatcgggtaaacattcccattccaaaagggagacattggccaaaagaaaggggctccaggcctcacacaagttcaaaacccagcaggacaatcattaaaccttaaagttccaaaataatctcctttgactccatgtctcacatccagggcacaccagtgcaagaggtggactcccaagaccttgggcagctctgcccctgtggctttccagagttcagcccccatggctgctctctgctttcagcttttccaggtgcagggtgcaagccactggtagatctaccattctggagtctggaaggtggtggcccccttctcacggctttactaggcagtgcccccatgaggactctgtgtggggcctccaacctcacatttccccttggcactgccctagtagacgttgtgtgtgagggctatgcccctgctgcaggcttctgcctggacacccaggcttttccatacatcctctgaaatctaggcagaggttgccaaacctcattcactcttgcattctacatgtctacaggtttaacaccatgtgaaagtcaccaaggcttatggcttgcaccctctgaagcagcagcctgaactgtatctgggaccttttgagccaaggctggagctggagcagccaggatgtggggagcagtgtcccaaggctacacaaggtagcggggccctgggcctggcccatgaaaccattctttccaactaggcctgtaggcctttgatgggaggggctgctgtgaaggtctctgaaatgccttcaaggctttttctccattgtcttaggtaatagcactcatttagcttccttttcgtcatgcaaatatctctagcaagtagttgctcctcaggctgcttgaattcttctgaaaaagctttttctttctttgccacatggctaggctgcaaatttttcaaacttttacattctgcttcccttttacattctgcttcccttaaatataagttccaactcctatctttgctgcagcatctgaatgcagactgttagaagcagccatgccacctcttgaatactttgctgcttataaatttcttctaccacataccctaaatcatcaagttcagacttccacagatccctagggtatgaacagaatgcagctgagctctttgctaaggcaaaacacgtgaccatttgctccagtccccaataatttcttcatatccatctaagacctcctcagccttgactctgttgtccatttcattatccgtattttggtcataaccatttaaccagtccctaagaagttccaaactttccctcacttgctgtcttcttctgaatcctccagacttccaacttctgcccattacccagttccaaagttgctttcacattttcaggtacccccttggtactgattttctgtgttagccctttcttgcattgctatgaagaaatatctgaggctgggtaatttataaagaaaagaggtttacttggctcatggttctgcaggctttataggaagcatggtgccggcatctgctcagcttctggggaggcctcaggaagcttaaaatcatggcaggcctcaggaagcttaaaatcccaaagagggaacaggcactttacatggccagagctggagcaagagagagagagtggtgggtgggaggtgccacacacttttaaatgaccagattgcgtgtgaactgagcaagagctcacttatcaccaaggggatagtccaagacattcatgagggatctgcttctaatccacacacctcccaccagaccccccctccaagattggggatcacatttcaacttgagatttggagacaaatattcaaactacatcaaatgtgtttatgttgtttttctactctgaagagtggaaaatggtgtcttgtctcatcttgtcatttgcttcttaggccattggatttcccctttgtaacgtggctgttcgcatactttgtccatttttctattgattggtttgtcttttcttatcaatttgttgctctctttgtaataaagactaaaacatatatttcctctatatgtatatgtgtttttcccacatatcacttgccttatgactttcttttcagaatattttcccatacacaatgtttacattatcttgttctcatggctgatgagctttctctctcactttggaaggtttcttggactacagaattactgaaatatattcttttttttttttttttcttttgagatggagtctcactctgtcgcccaggctggagtgcagtggcgcaatctcggctcactgcaagctctgcctcatgggttcacaccattctcctgcttcagcctcccgagtaactgggacacaggcacccgccaccacgcctagctaattttttgtatttttagtagagacaaggtttcaccgtgttagccaggatggtctcgatctcctgaccttgtgatccacctacctcggcctcccaaagtgctgggattacaggcgtgagccaccgtgcccggcctgaaatatattcttatatttaatttaaattttgttctttgagtcttttcatcaatttgaaatttttgtaaatagcaaagaatctggttttgctttctcctggattgagagagagttattcaagtacattttcccactgaactaaatgccagctttgccttatattaaattctcaacatacctggacctatttccataccttgttctgcccacccctgtggctgcccccctgttacacttgactcagtggtttcacagggtctcaccctcaccttctattgctatgcttttcctttttttgtgtgtgctgtttttgaatatttattttgccatctaaaccttaaaattataattctgagtggaattggaatggatttttatttaattttaaaaataatttgcatttataatattgttcttctatccaagaacattatgtatgcctctccacatattcagattctgttcagattttaagcatggaaaaaagaaactcattttttacttatttatcttttatccagtgaactacataaattctcttattagtcatttgcttaatgactaagagaatcacttggatatctaagtatacaatagtatcatctgaaataattgtaagttcttcttcatatttatacaattaattcagttttttattttattgaattaggtagactctcctgaactgttgcaaatgaatgctgtctttgtttctattagctcagcctattattcaagctatattgaatctatatcttggattattctcaactgtttattctgttgtttagaaaagccataattgagttagaaattttaatacatattatctgtgtcttctctgagtttcatcctttctgctgtatttgttttgatgctatcttgttaggtatatgtatattcataattttttagattatcttcctcgtgtgttttttgaccaatatataggctgtctctttgtcaagccatttgatataatggtttttatcttgaaatctgcttttgttgatattaaacagctaccctggctttctgttggttcatatttgccagaaatatcattttttctgctgatataatttcaacttttccatatcctttcatgttaaatgtgattcttgtagacaatttattattaggtttcattttattatccaatccaagaatctctgtcttttgagtggttaattcaatccattcttctgtcctatcttctctatctagttaaatttttctactggtttgcaagttacacattctacttttactcacattgcaattactgctattctattaaaatcattattttggttttcttcctattatttttaaaaacttaacaactatattttcccctgcaaaatacatgtattaatatgattttatgttgttctgtcctgcctctacttgctctcaatcttatttagatactttttgttgcctttgcttatttagataacaattaactcctttatttattcacatgtattcttttctcttttgctaaaaaaaaaaaaaccttcctcaaagactacttccaaaaacagtttttgcatggtgaatctcctaaggccttgagtgcctaaaaagatttacatggtatacttaaattttcatttagtagattaaaaactctagattgaaattattttctttgaacaccttccaacccttcctccatcatgttcttgcaccttgttctcatgtcttctaagagattcacttgacctgatgttttcacatccctatttattctgcacatgaatgcattattagtcccattaacattttttttaatcccaagttaattctttgtctttattattgttattattattttgcattctgatattctatttatctctttgcatgtatttactaggctcattttttaatctagtcctcctggccagtactttgttgcctttctttaacagtttccctgaagctcctggggcacgcagttatcatccatcttcactgtgctggagcacaggctctggtggatgctcctccagatgagagtcggggaagggtactcaagctggagagccttagatgttgtcatttgggctctagaagttccctgcctgttcccctctgcatagctggattgtctactgagggctgctcccagctcctctcttctagaaagtccttgtttcctgtagggactgccctgctctggtgtaaccgccaagctccccagtgtgttagggaaaggagggaagcagtgcttatggtgactggtgccccacccagctgtgctccagcaccacctgacattctccagctggcacagggctggggctaggggatgatagggaaggcaggccatgctggagccatgctggggagaggaaaggcaggaccaagacgccctaccccaggccctctctgtcggcctcacccattcccacctcctgcccctgaggatttctaggtgtgtgtgaggacaggacactgaggctatgcactgtcttgcccctcttgctgattattcttaaattcggtttcatttctgccattagacctgactccagaggaaccaccccttccagtccttggctcggtcttgtgctcagggccttccttgactacaccacacggttaaggctgctggtatctttcaggcagcagcaatccagacagatggccacatggcagtcctgctcttttgagctggcagcaaacaaaccaacccattatcttatcctcctggtacaggggctagaaggacccttctctctgctaccagagagattggcagaatcagggcctagtaagtgtagctgttacatactgtgatctgacttttcttagatatcatttaagaaaaaaaaaataggactctatcccagcataatcctattaattgagccttgcgagcaatcatatcgattcctattgaattacagagtttctgaattaaatttatgtctcctttagttgagttcttcctgaaaccatagtgtgccaaaatggaaaatggaacatttcatattctaaatcagggcccagaaaaagacctgtgagcccaatctgggctgttttttaagtaaagttttattggaacacccccacgctcactcatgtatgtactgtcttcgacggctttagtgctgcaaagacagaggtgagtagttgagactgcatggcccacaaagcctaaaatatttctgtctcaccctttaggaaaagttttgtccacctgttttaaaatatacccaggatcggttttaatcaggtgtcataagacacgcagacacagaaatgactgtcatgaaggtggaagttgttttttttttttaactcacagttccttggaaacaggaggcccagcacagcatgcagggccacacggggaggcgccggtcatctggagataggagtgaggggaagcatgggccaaagcctttgaggtggtttctatgggaaggcagggcagggggagcagccccctaccccagctagtgtgcataacggcagccagctcagaggcaccaggtaccaggtaccagggcctgtctccggctgcctggtccctggcctgaagtgcttagggcaaaggaacgttgcctcctggagagtaagagccagctggagagggtagtcaggagtgtagattctggattggctgctccgcataggagaggtgtgctgcggggcaaggcctttgccatctcttaacattggctcacctgggaggggcagcctctccccagtcagggaggtcccaggtgccagagccacaaaaacaaagaaaataagaaaacgcagggccagatgcagtgactcattcctgtaatcctcgctgagcccaagtgttcaagaccagacagggcaacatggcaagaccccatctctgtaaaaattaaaaataaaaggaaaataaatgaaaaaagaatatatagttaatacatctcccctttgtcagtggcagggaaattctgtacattcttgtactatgttttgttttgttttctaatctttctgtatttttctgagacataactttgatcatggtaattcctgtaaaacattttatttatacatccaaaagtagaatcactgagttcacgtttaaagaatcagtgtgtgaatgtgtgtgtgtgtgtgtgactctgtgtgtgtgtgagagagatgatatgtgtgcattcctggggtgtcacaggaaatgttagaattaggagcatatatttctcattttatatgatcttcaacgcaatctattaatatttttagttcaaaaatacttttttccctcaaactccaaatatttcatgtttagaactgcagaaccacatcatgttgtcctaggaatcaccgtgtttccaaggccatcgaagtgtctcatgtgggtgctgattgatgggcccgggaggagcatgggtgcccctggacaacaggtgcccactgttgagagcagccttgagattgtctgtcccaccgattgcaggtgcacatagcacctcgattctctaatgcctgatgtccctctccatcagattccgaaaaatggggcagttccttctttcccagatacaaaaatggtagtttgtggcaagatgagtggcctcagcatggcttgcacgaggcagaaagacacaagcctccactgctcctgcactcaaggacctgaaccagcgtgggaagcaatgggccgtcccccaccacccaagctgggcccatgtgctccctccctcttctttctaatgtcctgtgtggtttaacttctctttttacctttctgcaaaatacaaagaacttaatcctgttggtctctgaatgaaattgaaggtgaatctaaaccacccattgcgaaatgtagtctgtctctgtgactctgtattcattttaatgggaaaaatacatgaaccttctggaaattagcttcggatttaaaactaacttgccataggatcaaaagcttatgctttttagtctgttgtaacaaaactccatgaatgccatttctgtccagtgctcttgcaagtggggaaggaaaatgctgctgttccgggtgaaagctggggctgggttttccgtgtgaccgtggtgtgctggtcagtgtggacctcagaggggcattgcaggagcacagacctcaccagtgggcaggctgaactggaggacagtgggattccttgggacctcagggaatagcctcaggaatttgccacagggcttagacaatgcttatttatacttaatttaggcaacacaggcagcaggcttttgaataaaacaccagagaccatgctttcctgagaaaaatgaaagatctactgccctgctaaaaagacttctccttactgaaaacactatgagaaaagataacctattcttaacatatatttaagcattcttgttttatgttcaatgttagtcattagaacacagggcttataaaaacaagcgtgcttttgcagcatcaagaagatacatctactttctaggtaatcgacttcctaacatggtaacatattgtaccttagagaaatcctacactgcgtttctcattccctggctgaaaagcccaagaagaataaagccagaggagagcattatttttgagagtgctgtggcaaaagaatatccagacagaagagaaacacatggactgacttaatattgtgtgtcctgggagggccatgtaggaggcatttatcagcgtaactttagtaaaacaacctgtcttaaaacctgagctgctgtggatgcctgaatgattgtttctttgcattaagtgcataaatgcatcgagacaaagagcggtctcccttgtaccatttagtcctgggagaggacaactcagtggaattgaggtagatgtaacttcagacccaagagcaagcctggtgctctttgacagtgctgatgtgcagttgtactgtgggcttgcagctccccacttactaagtggtttcatgactcttgtgaataagtgccacataccaggtggtggtgattaatccagcagcaggaaggcctgcaggatagaaaaggcttgtaggatataagggctgttgcagagagaatatgggtgtgcatgtgtatgtgtgtgcacacatgtatgtgtacgtgtgtatgcatatagtctgtgcatgtatgtacatgtatgtgcgctgtgtgtcctgtgtatttgtgtgtgcaaatacatctatatgtgtacacgtatatagtatgtgtatagtctgtagtgtatgtgcgtgggcatgtatatatgtgtgtagtatatgtgccaactgtttctatgtgtgtgtctgcatgcatgtatgtgtatgctatgtagtgtgtgcacatgtatgtatacaagtggatgtgcagtgtatatgtgtctagtgtgtgcatgcatatgatcctgtgtatgctttcgtattcatgtgtgagcatttatgtgtgtgcatgtgtgtgtatgcgtatgtgtgcagtatgtgtatgcacatgtatatctctgcttataagtgtgtgtgcacatgtatatgtatgtgcgcatgtgccatgtagtatatatgtgtgaacatgtatggtgtgttcatatgtgtgcacatatgtatttttgtgtgttgtgtggtatgtgcatgtgtgtggtctgtgtgcatgaatgtgtacctgtgtgtgtgtattgtgtgtgcatagtatgtgtgtttatgtacatagagccacacctacacccactcagcccttggggctatctttccttctccccctgcagaaaagcggctttcccgggggatttcccacgccagctcagccatcgtctccctggcccggtcccacgtggcaagtgaatgcaacaacgagcagttccccctggagatgccaatctacacattccagttgccagacctgagcgtgtacagcgaggatttcaggagcttcatcgagcgggacttgatcgagcaggcaacaatggtggctttggagcaggcaggtgagttgcccctgccagcaggcccaccctctttaggcttggtgaatggtgagctggcctaacctactctatgagcaagagaagggcacatgttctcagactctgggcagttttcagttaggattctagatgctgcaccgcacctcctgctctacgggccgacagtgttctagccagcatgggctggatggaggggccgataactaggtggtgctgaaatctctcgagttttccccttgctcctaaatcccagtcctcctttaaggagaactctatgcttctttgccttgcttctctctttccccagacaactcctccgtgggtgttgaatgaaagataggaaagaccatgggctttagagaaaacgggagacccgccacttcctgtggacttgggcaagtcaggtgatctctctcagcctcagtttctccatctgcaaagatgaggagactgctgacccggcaacgctttggggtactaagtgacatgtgctttccatagctgtccattccctgcctgcgcagcctcttccagcttccaggttaaggaagcacaaaacctgacctcagtctccttccttctccttagtgtttcctcaccaccctaacatcccaatgaagaaagcgttcaagaagcaagacaaactctcttctttggaatgtttaaggagaaaataatgagtccaaaacaaatgtctaaaacagatttaggttcttcctgagacaaagcaatgccagtttcactcataatcattcacattataaacattgcaaaatcacatatctgggggtttctcaggcacgcatgtggaagatgttatggctgtctcctcaggcccaccacgcccctcccagtgggagccccgcctgcctgcacgggctgacagtgcacatggagcatgtcctcagccagtgggaagccctgctcctgctggggtggggaagcatcgccttccagtgctgacccagccttcagccagctcttcatgtccactgtggagtggagcctccacttccaaggcttggtccgtggagacgtccccagatgtgtcatcccaggagtttagggctgcagccagcaatgcactgttagggagtagagcttttctcggtgctcggcgaagacccaataaaattaccaagcactttctagagttccagaagaagacaggagagaagtacctgtaggttggtatgattctgatattggtggatggaccaatcaggaccctggtaggaaagaaaaggcagcacaaaactgtgagataaaggactccataaagggactgctttccaaggagtgggcaggatttaaggacactagtgaaggatactaccgttcctgggactaccctcaggcctggcaaaaagacaagggatgagagtggctgatggagatagccacgggcagtaggtgtggcatccgggagagagaagatgctggggaaataaatactctgaccacactcttcctccaccatccaggttctgaccagtgcctcttaatggcagaagggcagattgcggggagctcactgatgtggtccacgcaggtcaccctctgcatacagagcagcatggagaaggatagacggtagatctgtggggccaatgggaaacatccagaaagtcaatgtgccgggaagttttaccagacctggcttctgtgtacacgtgtacacctgctttcatgccattgcttgtcattgtttgcccagggctgtcgtcatccaccactttcaagagggaaggcacaagatgcgtttagacaaaggacgagatgtgcctagtggggcttatttgtgttgggcaggcttgcagtcaggtcgtagccacaggactcatagaagcctcaccaatggcatgcttgacattagaacaggctctacattcccaacagctggatctcatgttgtgactgtggagaaattctcatctcagctgcttcgcagccatcaagagcaatccaatgactggcacccacagccttgctctgtcttacctcagcaagactcaacaaacaaaacaattcagctagattagcaataatctaaaccactcactgtgggggctggctattttaaagacgcttctatatgactaattcagataagatattttcaatagaaaaagctcactattcatagagaagcggaaattagtatttgttaagaaagaaacaagtttcatgggttactctctgttgaatgctacggcggtgtagacctttatacagctcagcactgacgattgctaatagcttgggtgatcatagcagctgcctgagtgctgtgtttcgtgtgaagcacagtctcatgcaaggttgtaggtagaccccaccatgttaccttctccttgagccctaccatgcttagcaaaagccttcacttcttttgaacgtcttttctgttatttttttccatattttgcattttaatttttatcacttatattttaccttccagactagcattttaagatgggactctggcttcatccagtcttgaaaaataccttttaaaaacccaaacttagtgagttaagatgttaaattatgaatagctcattgtttatgttgggcaccacgaagagaaccaactggaagcagagatcagtgaaggcaggaagctcaggctcccacccagtggtggagaagccatctggtctacactcgcaggaggccttgaggaagtgggtctcactcttcagggagtggtcaaaggtgcttgtggtgcaattcgcgcctgaagatcagggatctgcctgggacaggagtcctagtagccaacatgtcttcctcgtccctcacgctgaaaaataataaaagtggccaaacgcgatggctcacgcctataatcctagcactttgggaggccaaggcaggagaatcacttgagctcagaagtccgagaccagcttgagcaacatagtaagaccccatctctacaaataataaacaaattagccaagcatggtggtgcacgcctgtggtcccagctactcaggaggctgaggtgggagaattgcttgagtccgggcagtcagggctgcagtgagccatgatcacaccactgcactccagcctgggtaacaaaaccctgtctcaaaaaaaaaaaaaagaaaaagaacagaggtacgcagacaactgtgtgtgtgctccctcagaggagtgaagcagtctctgggctgggtgatagcatgaacctgacccctgcccaccatccatctgactcctccgaactcctttcctctgctctcaagcgaggtcttagactaggtcatttctcagtgccctgctatgctcagactcacgtgaagaccctcagccggccagtgctaaagggtctcccacagcccatctgggtgaggagtttggtcactggaaagcactggcagctcctgtaccttccaccccacagccaggctctgctcccgtggcccccactgtcacagtccacttttccatcatgaagtggccatccaagaaagctgctcagtattgctgggtacaaagggtaaatgcctcttcctaatagcttagtgcttagaatctttatgaataaactatttatatgcaatattattttactgaatacatgagagattgaaatacagatgtcaaaaaattatttagtaaaaaaaaaatccatttgtttaagggacagttctagctgtgcttggcaggaaacattatttctgtcataagactttgggtggaggacttccttttcccttggacagaacatgaacccagggctcaggtggttctgaaaactggcaaacagtggccttcactcagttaacattgcccaccatccagctgtccatcctggggcctgattccactctcctggggccctgcgtggtatctgcctggcctcccgagccacataggcagccccgtctatttttgaggcctctgtgtcaagtggggtgccagtctgaactcccataaaacccacagatctgggagactggtcttccccaagtcttcaaaccctggaaaacacaacccactcccacctcatgacagtctcagggcaacagaagggccggatcatctgggcctaaaaccagctgacctcctgagaggaagggaaacacctttcgttctttaatgactagcctgccattgagaaggcaagaaaccactccttttgccatcagctgatcctgctgcatttacacaggagatggctcggagaccggggtctctgggttgggaagtatcatctgctgcctgtggcagcagctaaccaccatgtgggtgagatggtgtggttcttcagtgtgtctgggggcagagggcagaggcatttttgtgtaatgcaggagtcactgcatacatgggagatggaaacgcatgttgaaaaatctctaggcacacctttgagttgtgctccaggggaggataattggattgaggggaatctgccagagaatggtaagttacagaggaggcttgtgggcttctgagtcagcccgaccctggcttgaggcccggattggcagggggagcttggccacgtcacttggccggctggagcctcacttccttccctctgaaagtcagagatgtgtaacggcggccaaatggagacagattgacccagtgtcagcctgtgttgaatgcccacgaaatgccccatccaggtctggggctacctccacactccaggcagatgaaacccctgccctcagggaggtgaaattccagtggaagaaagccgatgaacaaggggagcatgaaaatgaagtggggcctcagaggctactctggggaggttaggaaggagagggaatcccgggatgccgctggagggcagggagggaggcagcaacagacacctgcgggcctggctttcctggcagagggagtctaacatcaaagtcttggcatatttaaggaagccagtgtcacctgagctggtggagcgagggtgagaggatttggaaaggagggcaggagaatgggagccgggcgctagggagcctcgtcctttaggcttcactgaaggtagataagcagcccctggagggttttgagccgggggctgacgcgtcttgattcacatctgacagattctggctgctggagaatggactatggggtggtaagagaagaagctggaagagcagggagaggcagttgctccagaccagggcagagagagacggctggcagggtcgtgggggtggtagtgcaggtgaggggcagtagagagacacggctatggggtacgttttgaaggcagacctacaggccttgatgatggagggctggggctctggcaggcagggaagagtccagcatggccctaagaatgttaccctgaatatgggggtagataatgttgcctgaggagatgcagacccctggaggaagggcaagaagaagaggccagcactgtcaggcaaagcccgagactgtagtgagacttgtaaagttgctgcccagatgaacatgagggtctggagtcagagagagccctgcgttggggatgcagatgtggagttagtgccctaaagtgaaacccgtgggatcccggagtgagctcctcgtaggaccctcccaccatgcccccaacctggctccatgcagtggtgagcatgagttggacacacttgtctggagcatggacagaaaacaagctttccaaagactcaggctggggccctacagtattgagggctgaggaacagaagaaggagccagcagaagagactgggaatgtgcgggcctgggaatcagggcgaaccagcggtggatagtgaccctgacgcccagggtggaaggtgtttcaagaagggagcaatcagtggtgccaaatatgccagtaagtcagtgtgcactagaaactgaccgctgggtttgactgtgagggcaaggttctcgggaagccatgctgcactgtgcttgatacagagaaaggtcaggaagtggcttccattccccttctccttatagctctcaccatcggctgctgtgagtcatctctttcctccagctacttttacactcccttgccttccatctcgtgaggcttccattggcctcctagctacctgggaccattccttgcttccaaaggcagctcctcccatggccagttgccaagtttgccttcccatccttgctgtgctttggagcttcctccacccatcagtcaggcagagtcgcggctgcgactctgggcaagcctggaaataccacgttcctttgtgggccaggtgcagcgttgggcaaccctgggcatagggcctgggccagagtgtgggagagacagaggccagggttcacatctcctcagcgtagtggtcacagtgtggttcctgtgcagccccctgagggggcgtcaggctctcctctgtgacgtcgtgatgaagcagcccaccttgtggggctgttgtgaagatgaactgaggtcgtgtgtgcacagggctggatgcatactcagcatcaagtaaatggcctcctctactaattttttattttcatagagtggtatttcctatttttctttcttcacactttttgctataaagaatttaaattgtgaccaaatactaagttatcttctccagcattacaattattcattagtaaacattgagcacctgtggtgtctcaaatcctattgtcatagcccatttgcattgctttaaagggatacctgagaccaggtaatttataaagaaaagaggcttatttggctcacagttctgcaggctgtacaagaagcatggggccagcatctgcttctggtgaaggcttcaggaagcttccagtcctggcagaaggggaaggggaagcagatgtatcatatgatgtgaaggggagcaagagaggaggtgccagactctttttaacaatcatctcatgggaaccaatagaacaagaactcactcattactgcgaggatggcaccctgccattcatgacgaatccacccccatgacccaaacacctcccaccaggcccccctcaacattggggatcacatttcaacatagatttggaggggacaaacatctcaaactatatcaactaccaggattattggggacaaccaagatgaggaacacaaggcccctgccccagaggagcaaaggacatgaaggcaataccgcagtcccatggcaggagctctcacagaagcacgtgcaaagcacagtgatgcccagagaggggacatccgagggcccaggtggggagggagcactccagtgatattaaaaggagttacagtgtcacatttagggcaagaatcccctcatctttctgatagagaattgtcacgttttgttttctttcatcaaaatgtcgtggggtgatgagcaaaaagacatcttattttaaagtgtgtggtaaccacctgctccaaagctgaagttaattggtcccattatcacggatgaatcagaggactattgctcagaaaagtcagaataagtgactaatagctccccacgtgtgaaaccacctgcctctctcaatggtgttcacctgtgattttcttatttgcagaacctcaagttttcaagctattcacaatgccagtgcccgtgtcttgttcctgttctgtggttatgtcatggggagttgggaatgaccactctgtcaaagccaggaatagaaacatgaaaccatgaaactttgcatgttcccaatcgcactccttgtatggagcacacctttatctcgggcaccacattctaggttctgctggatgttagaatagcactgggccatgatggggtctccggaggctggaaagtgctggcatttaccatggctgggccatcttttcagggcggtcacgtctgatgtacagccctaggagtgctctcaactgagtaagagtcttaacttctagaagctggcttacatcaaaccactaagccttgccctccatccacacagctgctctagcaggctgcatcctgcctacctgccctctcccaggtgtgcacagtctcaacagcctgggccacactgttatctgcacaggttacaggagctgtctgcttgcccttgagcattcaggtgtttctctgtgcatagctcccgttagcagcatgcacttcagggacacgagtaaacctcccagacacctgctgaacactcccaggatacgcctcccaggatacacatgtgaaatgaatggacagaattcctatttaaatatccttgggctaaaggacgctgtatgcatttctatttctgcctaacaaattaccacacatttggcagcttaaaacagcacaagtgtatcatcccacagcttccgggggccagccgtctgctgtgctttagctgggtctgagactctgctcatagtctctcaaggctgaaattaaggtgtcccctggctgtgtgctcatctaggggcagatccataagttccctgcggttggcagaatttagttccttgcagctgaatgactgaggttccattttcttgctaactgttggtgcctagagagtacccaagagactcaggagtgatgcaggttcactgtgcgctgcttccttgccaagtctcatgcatgtgtacaggttgcacaaagcaggtgtcttacagacaggcagtgagggacaatagcagcctagggttcagggtaagacagtcacacaagagttaggacagtgcccagggtgcatgctgtcttgtgctgcagctgagggaccccagaaagcagcctgctgtgggtttgatacctgggggatacagtcattattgggctaaaacattgaaatacatcctgttctcggagggaccagaacagagtccagactggtccagctagtttcccgtgatctcaggatactgcattcccagcacattcttttttttttttttttcctggagacagggtctccctctgttgcccaggctggagtgcagtggcacgatctcggctcagtgcaacctccaccttctgggttcaagcgattctcctgcctcagcctcccaagtagccagaactacaggtgcccaccaccaaacccagctaatttttgtattttagtagagtattttgtatgtagtagcatgttgcctacagtaatgcttgagaactacaggaaaggggaaagaacggggtcagtccaaagccatccaggaccccacaccacatccttgccgtctagctctcttcttatggcatggcagtgaagttgtttactgctttgggttgtttactgtttggcatggcagttgtttactgcttcaagaccagccagagaatctctcctctctccccctttccctcttccctcttccgtattccctttatattctaccatctgccctttctctgtaaatctctctgactttccttttctctgaccactaaaccctcttttggtcctcagattaggtcaggccaacccaggataatctcccttttgatcaactcagagtcagtgaatagtaaagtaattacatctgcaaaatcccctcactttaccccatattataacctaatcacaggagtgacatcccgtcggagtcacaggttccacctacacccaagggaaagggatgacacaggagtacaccccaggaggtgggaatctgaggaccactttagaattctgcctgccacagatacagtgtcattacttgcagtatgataattcttctatgctaaaagatccagaatgagagattaaatcatactgaatatgttgtggtcaggggaatttttttgatttcctgatgtgccacttttaaccatttcacttggattggtatgttacagcacactgtgcctagaggcaggcatgcatttggactgaattctacttttttttttttttttttttttgagacaaggcctcgctctgtctcccaggctggagtgcagtggcacgatgtcagctcactccagcctgtgtctcccgggttcaagcgattctcctgccttagcctcccaagtagctggaattataggcatgcaccaccatacctggctaatttttatatttttggtagagatggggttttgccatgttggtcagtctggtcttgaacccctggcctcaagtgatccacccacctcagcctcccaaagtgctgggattataggcatgagccactgtgtccagccagaattctactcttgatggcttcaaatttcaaacagcttgtctctgagccctccaaagatatcataccctttgattgggctcttttgacaatcagaaccatggatgtggtcatctgggataggatggggtgggcactatggcaactatgcttttgataatagcagccttcacgtattggggatctcctatgtgctaggtgtattatacgccattttaattatgtccagatctcacatcggctgcatgcaattgccaagatgctcttcattttacagaacaggcagaagagacttggggaagccgaagggtttgcccatggctgcctggctgtgaaatgtcctcatcctgcccatgccacgagacctcctcagttcagctcagagcgttgggaactgtcatcctttccctcaggatactttctgccacgtgacccattccaaatatgaattgcatgatttattggattttcttaaaagaataaatcaccaataccagagaaaatctccaaaggaacactctttgagaggccaagtagaaagccagcagccgagttacacaattctagagggacacgttgctgagggcaccgcgcaggaacatctgacagaggcaaagtgaaggggggtggcccagggcgcccacagatgatgggggtggcccgggaggcccacaaatcacggcagtccccaagctttacatttaacactcctcacacagagtgactgatccccaagtcctgtcaggaagaaaatcaaatgaagttatcaaatttttaggagtatatggtacgtacagaagaacagttcacaagcccaggagacttcagaccaagcgtggcaagaagcctaccttgcggcagttccagcacagctgagaaagcgtaaaggaggaagcattttgaccatttttgtgactgactgttacacattaaccttctttttagggcaaacagagttagtttaagctgatttgtctacagctggttcactgaatcatgtggactagccaatgttttgtgttttgtttatgattagagctaatatctcggggaaatcaggatgacttaagttttggctacatggttataggtggttggccttggggtgtgtctgaactggggcctctatttttctttaacagtcctgtaaaatgcagggatacataatgttactgatgagctattacccaccaagactgaagtttggaagcaagtcatgtgatgaatctgctgtaacagagctcgtaagatcaaaaaatattcattaagtcactattgcattgtcattatgttctcacttttatttttgtgaggaagaaatagaaatctgtttgttaatctaggtattggaaatgaaaagcatgtgttcaggtgggagttaaggaagggttagaaaatagaacctttagatgtcttaagaagtggtaaaataaaactggcagtgtatcagatccatgagaagccagcctgttcaacaattctgggtaaaaataagaaacatgtgatgttaaagcatatattaatgacaatatgtagtcacagttttatgttgtagccttgtttatagactcagtcagcatctaaggtaccccttaaatatttcagacatactcttttgcattttatggaaaaaataaaatgaggtgaaaatatttgcaaattggggttttctgaagacattccatccagcagattcaccacctgaatcctttctttgccttcaaaatgtcatctcaggttcaagcagcttccagctgtcttttctcttagagtcatctctggagctagacccattaccctttcattgttttaattccttattgaaatgtacatgtgggaaagtgtgcaaatcataagtgtagaacagatcacatcctataacaaggactcagacaagaaactcacatcaagaaaagtgacttcttatagcataggtttattttgcctctttttgagctttatataaatggaatcatgaatgggttaagttctggattcttctgcttatcattaagcttatgcaattcattcatagagttgtgtaattaccatatagcttatttattctcattggtgtattgcactgcaatgtatatacatgtattacaaataacttctccattatgttattgatggattttttggtgtcttagctcaggctaacataacaaaataccatagaccaagtgatttaaatgacagaaatttattttctcacagttctagaggctagaagtcccagatcaaggtgctggccaattcagttcctggtgaggattctctttctatcttgtaaacggctgccttctcactgtattctcacatggtctttcttcagtgcatgccttggggtgggggacagtttgagagttgaagctctctagagtcttttatacaaacactaattctgggagatcagggccccacccttataacctcatttaatgaatttaaattacttccttgaagtcttcgtcttcatatatagccacactggtgattaagatttcaatatgtgaatttggaggggacacattcagtccataacaagctgttgcaactttgtcattattataataaaagtggggtgctatgaacattcttgtacaggtttctggtaagccatgaacacatttctaaagatatatacagtcatccctcagtatccatagggaatttgttccaggaccctccagatactgaaattctcagatgttcgagttccttgtagaaaatggtgtgctatttgcatataacctactcacattttcccatatattttaaatcatctctagattacctgtaatacctaacacaatgcctacatcatttcatccatgtggatttgacatactatttggcacacagcaaattcaagatttactctttggaactttatggaatttttttttctggattatttctatcagcagttggttgaattcgcagattcagaacccacagataacagagggtcaattgtacttaggagtgatattgctggatcataggatttacatatgttcagcattataacagttgtccaaatagttttccagagtggatgtaccagttgctcttcctctgttgagagttctggttgctccatgttttttgtctttttgttttagttactgtgttggaagtgtaggagtatccacacagtggttttaatttttattttctgatgactagtaaaattaggtacttttcatgttattggccatttgcatatcctcttttgttgggtgccttttcaggttttttacccatttttaagattgcctttttgattgacttgtgggaattatttatacattctagatatgggacctttgtcaggtgtgtattgccaatatcttcacccaccctactggttcccttttcactcactgactgatacactttgatgaacagaagatcatgactaaaatagttcaacttaccttttttttccccttacttgagagcctctatttcagcttaagaaacctttgcctaccccaaggtcctgaaaatattctcctgcctttcatacttaaatctataatccacctaaaagtgattttcataaatgatgtgctatgtaatgaaagtccattttcccatatattcatcaacctgacatggtaccatttattgaaatcatcttttctttattatgctgcagtgtaaccttgagatacagcaggtgactgtgtaggtgtgggtctgattctgggtctgttctgttccatcaacaattttgatgttattcttctttatcattaagtttaaatcattttaaatacttattataatttttcctttgactcataaattacttagaaatatgttgcttaatcactgtggggatatttctaggagtttttttttctagcttaattcttctgtggtcaaagaatgtataatgaatgaattcagacattttaaatttgttgagacttgctttatgacccagcatataattaagcttaataaatattctatgtgcacttgaaaaaaatttgaattctgtccttcttaggtatagtactttttatatatgttaattatatcaagtttgttaattttgtcgctcagatcttttctattcttcactaagtttttgtccacttattctaccagctattgaacagggtgtgttaagatctcctactatgattgtgtttctctgtttcttccttagttatcttttgctttatatattttgaaactgtgttagtggatgcatagacacttagaattattacaccatcctggtgtaataacaaaactaaagttttgttagatgcagccctgatggcagtgaagtctcaggttttcatttgtctgaaaatggcattattttactttcatatttaacagctagttgtaggctttacagaccatgtaagttctctatcacatattcattctctctttctctttcccttccctctatacctcttatagaccaaagtttactgactcctgatctatattattttctccctctactttggatttaatcactgttcctttgtaactttttaacatggatgattaattcattaattcctagcctttctttttaactcttgcaagtatttaaggttattaatttttttctccatactattttagctatatccccaaaattttggaatgtaatatttttgttattacatggtttcaaaatattttctgattttcattttggtttattatttgacccatgaattattgtaagtgcttctttgtttgcaagtatgtaaaaactactaaatatttttagttatttttattatagatttcttacttccattgtggacaaaaagcattgtctgtatgatttgaaatctcttgagaactttgcttcacgattcagaatatgatcagtttttttaaaatcattccatgtgtgcttgaaaataatgtttagtcttctgttttggctgcattgtatttgtccatttggtcatttattatgtttttcacatcttctgtacatttattggtttattttttactttttctctcaattaccgatagagatgtgttaaaatctttcatcatgattgagtacttgtctatatctccttttattcctatggatttttaatcctgcataaatataatgctatgttattgaatacagcaattaaactgatttcttcctcatgaattgagcagttgaacagtgtagagggtgcttattaaattctactaatgctttttgccttttgatttattttatctgctattgattcagctatgttagctttccgtaagttaaaacattcctgatgtaccatttgccacctttcatacctttacctatagcacttttgtattcctctgttttagatttatctcttgcaagctgcatgtagttaatttattcataaaatcagtttcacagcctttgtcttttaacaggtgcatttatttttaatgcaattgccattttcccccattcaatgtggtgtttattctctccttacacatcttcttttaaatcaattaaatattgtttaatcatgtctttttaaaaattctacaagttttgaagttataccctctctttccattattaagagtttacccctaaaatatgcgtatgaatcacatctcaaattaattaacatcttaacctactttacacccaggcaagacagggactttggagtagtttagttttattcatccttattctctcctgttttgtaagttgttgtcatttattttagttgtatacttttaatctcatcagacattagtgttttatatagtcaacattcattttgatttacccatatgcttaccttttttgtttctcctcatttcttcttgcatgtcagatcttccttctgtttgaagttcatcctttacagtttctttaggtgagtgctaattttactctctcagtttttgttagtcttaaaatgtctttgttttgccctcattttttgaaaacacttttcatgggtctagtattatagattgccagttattttcattcagcacattgaagatttttttttttttggcttcttctttccattgttcctttgaagaggtaggctgtcagtctatcactcctttgaagataatctggtttttttctttctctaggtgctttaacatcttttctccctgtcttttatattgtgcagtttcactaggatatgttaaggaagacattaattttattgttcttagaatgtcttagacttttaaaatctgtgagtttatttttacatattttggaaaatcctcagtcagtattcaatattgcctgattcatgcctttctgaattttgattggacaatgttagatcttttcagtctattcttatgtctcataaactctcttgcatcttttctctttccctctttgttgcttcttacttatcttcaaatgtattaactttttccttcaacagtgtccaacctgatattaaactgattcttacttttttactttaatttttatatctttcattttaagttctatatgtgttttccaaatctgcctcttattctttggtcatattttgtttaattcttttgtgtattttaaacatttttaacatgcttgtttacagtctctaatcatttttaacctcaagtttataggtatctataaactgctgattttgtgtgtatgactcttactcacagtggcttgttttctgttgtgtttgtagttttgggttgtgagcaggatgttatatgtgggactcttgtgtggcctgtgttgagagtgtactcctcttagagagattgtttttgtttgtttgtttgtaccagtttcccaagaggaattacctttggtacttagaaccaattttaggttaatttcttggcttactggttccaagccacaaatcaatttaggtcaagtcttcatgacagtcaacatttccggggaagtttttattttcctctgctaagcctaggctaaaagagacaaattttcttcccaactgcctttgccagagcaaaattatttctaatctttgcattcaggatatagtttttgaggatcctaactctatatggaaggaaaaggccatccccagtcccaattccccacatttcagggtctccagccttttttcgagttcttatgaagtgattaaacagttaaatgtcttcactcgttggcagttgctggtttggtgcatactaatttccatcccatatttatttccggttgttggagatttactacactttctttcaagcttggatatacatttgaaaggattattgaaaataagtatttttattttctgacctcttttcctctttaaatctgtgccctcctgctcatcttagggagagggatttctcttttcaaacgaccagagacaaagccttcagcccctactttatctgcagtgctacacgcattcacacaagatcttattttaaattattttttgctaagtattacagagaaatcaggaataaataagcatagagtaactaacaaaagtaaaaatcaatgagggtttgtagggatataagaaatcttttcattggtttttaaaagttgctttctttggttcattaggcttaacacctaaaggccaggtctttccttacattcctcacatggttccttttcccgaagatctactcaacttttttctttaaatcttttttatcctaatactacaatctaaccaatgaatgtaggcaaaaaaaaatttaacatgctgtatttagatgtctacccaattcaagagtgtaatttgcatttctgagaacctctggacagtgcttctcaagcaatctgtgttgaaggacaactcttttctttagatttccaattcactgtctccctatgcttctataaaatttaataaaaatattacagcaaagcgcattgctataaaagctcctaaacacttcctcccattttctgtacttgcctcattgtgcaccagctgacctccctttaagcagcaccaggcactctgtgtgcaaaagcttccctttatttgcagttcatagtctttcttgcatgaatgtcagagcagttgtgcttactctaaaaaggactttggtgtataaaggtaccttttaagccaaagcattttggttcactcattcattcattcattagtatatgcataaatatactcctttatttaactcaggattttggacctgtatatgcataatacatatatggggctttctatatgccacgccctatcttaagtactttcccaatattaaataatataatgttcataaaaactctgttagatcaggactattattatctccatttttaagaattgaacactgaaacagagtggttaagtaagttgcccaacaccacactgctaagaaatagtggaactgagatttgaacccaggaagtctaactccagcttctgtgcctaaccagtctgctggctgcctctctgatgactaccttagacactctagtccagattctgcaagggtaggtgttccaaagcccactatttcatcctcattttcaacttgaatcagttggtctttattgcacagacctctgaattgaaaagggaaatcaggtctttcacctcctttgtgggaagagtgatgattggttagcgtgtctgccatggaaagtgtggtgatttttcaatgctgcttgctatggtgtagaggggattgacagaagacacttcagagaagtcacctattagcttcagggctctgtgccttcaaaaaaattgaaaattataaccaaactaaaaatttcaactcaatctattgaaacagcggaaaaatttagtcaaactagcattagtttgcattagttagattcgcccaaaatatttttaactgaattcaacccatttttaaaacttaatcgagacaaatgagttaatttacatagaaattgtctttggcaccagaacagaatgtctccattgtaagactatagagtaaacccacatgccatttccttcgtcttgaacatcttcacatctacaggaaaattggaagatgagtatttatatatcttgcaccaaaaatcaccagttttcgggactttgtcacatttgctttatctctctttatgtgtatggaagtacatacactttttctgaatcatttgaatgtgtattgtggatacttcacttcttctgaaaataaagacattctcctatatgacttaacagcattagaaaattagcactaacttagtaatgtcaactagtagagcccatactcagattttcccaattggccccaaagtcatttttgtaatttattttcattccaaaaaacccaactttatgcgttacatttggttgttatggctctttatgcactttttgaaaaacattctctcttcttttgtttttcatgaaaatggatattttaagattcccagccagttcacgtacaatggtcatatctcattgttgaatgctccagtggggttaattcctcacccttctcccaagtgtagacctcggggtcatatgaccctgggttactctccttatatctgtaataaaggctggaacaagcagaggccctgctgatctgcacagtctgtagggataggaaggggaaagtcctgctatgcctagacactggcagtgagccaggttggggagagagaaagctcaagggaaaggaattggggtgtggggaggaaggaatatgggaggaatgggataacatggatttgaggcacttgctcattatatggacccattggatagccactccccacctaggaataacaagtcagaagtcttaaagaagaatcctcagtctctactgcaggggagaggccaagccagcgcctccccagaaccggtggcagaggaataaacattgtgtacagcacatattcgtcagcatttaatagtatcatttatctgaagatttgaatatataatgtatttttaaatactgtcttcatgtgatataatgaaaaaaattgccaaattcatgttggtgttacagcgagggaggaaggaatgagagtgaaatgggggaggcaaatagagggaacttcagcttgatctttactcgtttttcttttcttttatgttgaaaggaacctgctggtgcaaatatggcagaggggtgacattcatttggttttgggtgatgggtgtgtttcttttggcactttacaaaatttgagctccagttttgctcgttactcagtaatacggcttttgaaatcatataggtcagagaagttaaaattggcttgccacaaactcaaccataacaaacaaaattagactggccttttttgtgatctgattttgtcctggatgtgtgagggctcctgttaagggtcagcggatcgtgggcaagtttacttactccctgtgagcgtcagtttccttctctgtaaaatgggaataacatcccctgacacagagctggttgatttattgaaggtcctgcagtgtgcaggagaacacactaacccagccagcaggagcttaaactgtgaggtcatcattatcccacacaactcagagtctgaaaacagggatgttcatggcagggctggcagctgcacagtgttatggaggacccaggcacacatagcaccctgctcttctctccccagcgggtcagtgctagctccagctggggatgcagtgtagctgtggccgcatcaggccacacatcctcacactgcatcattcagggcagcaagagagagcccctgattgtggcccttgtgaaggaggagcaagccccagcaggtctcctgttacatcttgtgagccaggcgacagcagtccatggcaaggggagtggaattgcacagatcgtcttggacgtatgaacatttgcacgttgccccatggggcaggcaaggaggcttgcctgaaaagccccagacacaagcagggcgctgtcagcaaggatgggagggaaacgctgtggggcgggcaagacaacgaggtctgccgcagaaatgcagaccacctgcctcattagcatattccctgtccctcctctccctgattgtctactcatgttccctatactccctgatggttgcccagagcactagcagctgagatcaatgcagaggatgaacaaggctgcccactttggtgtcaaatgtgtcggatttccaggtgttacagccattttgttgagttttatgcctttgtaagcaaagatcctgccattttattttactctgtggcaacccagttttactgtatcccagcctggttgttataaacactttttaaaagtcaagtgagacaggttgctatttcacagcctagagacaaagaagtgactaagtaactgcgtgttttttccaatgacgtccacaacggtccatccagtggtagtgtcagttaaagcccttacttgcatttctcatttagctttaataaggtgacttgtaggtggtaagaatataccaatttgttagtgtaagcattaacatcttcatataataaatagatgttcgtctacttaactttgtagtgttaattttaatacatgcttttatttagaattaagggcgcagttattttttatcagtaatgccacttattacaatggaatcactgaatcttaaccaaaaagcgctgaagagtggataaggattcagtttaaacaaagaaccaagaagtttttttatattaaactttgttaatatggcaacacattaggcaataactgtctgactctaaaataaatatactcctgagggccttaattttcaagcttactcgcagtctttatccttcatatttcattatttctattctgatagaaacaacaccttttattaaaattagatatttttatttgtacaaatttatggggtatatctgaaatttcgttacatgtatataatgtgtagtgattgagtcagagtgttcatcacccgagtacaatacatttttgttaagtagaatcaccctattctgctatccaacattgaatgtattccatcttactgtatgtgtgtaccctttaacccacttctcttcatcgtccctcaccactcacccttcccagtctctggtatctgtctttgcactctctacctctatgtgatcacatttctaactcccacatataattcagaacatacaatatttgtgtttttgtgcatgatttatttcacttaggataatgacctccagtttcatccatgttgctgcaaatgaatgacatcattcttgttaatagctgaatagtattctcctgtgtatttacacgttttctttagccattgacagatggaatgtagaaatgtaaaacatgttctgcttcttcagttgttcaaatcctattaatatttctctcttttttaaagaatttttgattaaaatgcttttataatttcttggaaatatctattataaacattctcatttgattgaagttcccaaagtgttgaaggccctagggaggtgcatgttatatttcatcctccaaataaaaacatatatatgtcactagaagtttcacataacattagaagcttgatacaaccactcataagcttgaagcaatttttaaacaattttagtattatccaagaagtgacatgtaagatgacatttgtgtcacctgcctaacatgtaaatgagccaggctatttatcctttccatagacacattcttttgaaaagcagccatgagtgcagatgcacctgtcatcaggtaggatagagtctcctgtagccatcagcctggagattacctttgcctcgcttctgtgctattcacccatttccctcctgtttcctgtatttctctggttttggtttccaccctcattttgtggagtacatcctcctgaagcttcctgagaaagagtgaatgaagatgtcttgacatgagttcactagaaaacagaacccggccaggcgcggtggctcacacctgtaatcccagcactttgggagactgaggtgggcggatcacgaggtcaggagattgagaccatcctggctaacacggtgaaaccccgtctctactaaaaaaaaatacaaaaaattagccaggcgtggtggtgggcacctgtagtcccagctactcgggaggctgaagcaggagaatggcatgaacccaggaggtggaggttgcagtgagccaagatcgcgccactgcactccagcgtgggtgacagagcgagactctgtctcaaaaaaaaaaaaaaaaaaaacaaaaacagaacccaaggtaactcccaatggctatttatttcagagacacagtcccagatgtgttagcaactagttttattgagaaataaggctgctctgaatttcttatatgagtcttatgttttcatttctcttgggtaaataaatatccacgagtggaattgctgggtcatatggtaaaggtaggtaatagtccatttcacactgccataaagatactacctcagactgggtaatttataaacaaaaggggtttaattgactcacagttcagcatgactggggaggcttcaggaaacttacaatcatggcagaaggggaaggggaagtaggcaccttcttcccaaggtggcaggagagagacagcacagggaaaactgccacttttaaaaccatcagatctcatgagaactcactcactatcatgagaacagcatgggggaaaccgcctccatgatctaatcacctaccaccaggtccttcccttgacacctgggcattacaattcaagatgagatttgggtgaggacacagagccaaaccgatatcagagtatgttgaactgtattagaaattgccaaaagtttttctaaaataattgtgcctttttacaatcccaacagcaaagtatgaaaactccagttgctccatggccccttagacatctgtgctagtatgcaaaatacaattgactcttgaacagcacaggtttgaactgcacaggtccacttccacttatatgtggatttttttcaaccaagtgaggatcaaaattacagtattcacaggatgcaaaatccatgtatatggagggccaacttcttagacatacaggttccacagagccaactatcagacttcagtatacacagatttgggtgtatgtcggcggggtcccagaaccaatcctgtgcagatacttggggatgactgtaccattgatttgtgtatattgatcttgtatcctgtgaccttaaaaaattgcttattagttatggttttttgtagcttccttatgattttctgtgtgaactatcatgttctctgctaagaagaatagtgttatctcttcctttctgatttgcgaatacagattttatttctttctcttgacttatttcactggctaggacttctcatactatgttgaatagcagtggagagagggcgcatctttgtctttttcctagtcttagaggtaaagcattcagtctttcaccattaggtatgatgttagctgtatgtttgtgtagattttttaaatcaagttatggagatccccctattcctagttttatgggaatttttaattatgagtattgaattttgtcaaatgctttttctgtattcatgatatgattatgtgatttttcttctgtagcccattaatatggtgaattatattgattgattttcaaatattgagccatccttgcatcccttggtcatggtatatagttctttgtatatgttactgtgttctacttgtttgtattttcttatgaattttgcatcatattcatgagagatgttactctgcacttttctctctttgtactttttttgattttggtatcagggtaatgttggctattttctggaggagcttgtgtaatattggttgttgttaggtatacctcttggtataacctttttgggaattgttctagttattacattatatacacatactttatcaaagtctattggtgttgacattttactactattggtgaagcatataaaccttacctgcctttttgcttctttattctctaccatttataataaaattgttttaaatatttattcaacatacattgaaacatataaacagataggcaatgtcataatttttgctttaaccatcagacataatttagaaaactcaagagaagaaggaaagtcttattatgtttgcccatatttttgttctttccatgttcttccttctttatatgccaaaatgccttcttttatcgtttcctttctgcctagagaacttcctttagccatttctttaaggtaggcttgctaggaacaaaatctccttgcttattactgaagaatatttttgctagctttaaaattctgggctgacagttattttctttcagcacttaaaaaatattatcttggctgggcgtggtggctcatgcctgtaattccagcactttgagaggccaacgcaggcagatcacttgaggtcaggagttcgagactagcctggccaacatggtaaaactctatctctactaaaaataccaaaaattagccaagtttggtggtgcatgtctgtgtcccagctacttaggaggttgaggcaggaaaatcacttgaacctaagaggcagaggttgcagtgagctgaaattgcaccactgcactccagcctgggtgacagagcaagactctgtctcaaaaaaaaaaaaaaaaaaaatttatcctgcttccttctggcctacacggtagccaatgagaaatgcactgtctttagaattgtttttcccatataagtaaggcgttgtttctccttggcagcttttaaggtttctttgtctttagtttttagaagtttgactatgatgtattttggcatgagtttctatgggttttttttctgtttagggtttgctcagcttcttgaatctgtatgtttgtttgttcatttgcaaaaattgggaaccttttagtgatttagtgattatttctttgaacactttttttttttttttttttttgatacggagtctcgctctttcacccaggcctaagtgcagtggcgcgatttcggctccctacaagctccacctcccaggttcacgccattctcctgcctcagccccccgagtagctgggactacaggcgcccgccaccacgcccagctaattttttgtatttttggtagagacggggtttcacctttcaccgtgttagccagaatggtctcaatctcctgacctcgtgatccgcccgcctcagcctcccaaagtgctgggattacaggcgtgagccaccgcgcctggcctcttcgaatacttttttagctctaccttatttcgcctcttctacggactccagacttttgtcgcagtcccacatgttcctgagttgtgttctgtatatgtgtttttttttttaagtttaatttttctctgttgttcaaattgggtgatttctatgttatacctttacattacactgattctttttctcttctctccaatctgcttttcagcacatccattgagtttttaaaatcagagttgtatttttcagtccctattatatctgcccatatttttgttctttatttggctctgttttgtatcttctattgttttggtaagactttctatttctttactacattttctaatttttcatttgtcttaggtatgtttgtaattgcttgttgaagtattcttaggatgactacttttaaatcccagtcagataactctaacatctgtcatctcagttttcatatcttttcttgttctgtttgaaatcttcctggttcttggtataagtgattttttttgtttgtttaaaagggtatatatttggtattaagttataggactctgggtcttacttaaatcttgtgttttagcggacctcctgacaccactctggtaggttcagggggccattgcctgacaactgccagagggtaattgaagtacaggttccccctctgcccctgttgatacctggggaatgggcttggtacttcttggcaggggtacttcctagctgagaggaggcagagattctcattacagccagatgagtgtgaaagttcaggctccctgtgtgtcctctgaagatagagggcaaggtgcttattaccacccagtggggttgaggtcttggctttgtactcagccttctctgacactccccaggtgatggagcaggcagtgatgagcaccttgttacagcctggtgagggtggaagtctaggcttctcactagaactttgctggcaggggtggtggtcgggttataattttttctgtgatgtttggctggaatagaagaggaaatgtctaagcagctactgttttgctaagctacccctttcctggtattctgtctagagagagcatgctttttcttttctatctttttttttttttttttttttgtggcctactctcattggttcgtttttacagtatctaatctgggatatgtgaggcaaaaagaaactccagggaacccaccattatgtcgttcctcaagtctcaagatccctagttagtctgccacttcttctccacttttcagagtcttctaatatgattttatacataatttccagggcttttcgttgtacttagtaagagaaataggaaaaagtacatctgatctatcttccctgaagtggaagtctctaaatgtaaatattcatgaaatttaacataactacacctatgtaactataatggttttgatgaatcaaatgaaatatgaactatactttcaaaggtatgtgtgcctcaaaaaagcaagacggtgaaaggaaaaaatagctttcaggagggaaagctgtgttcaaggaaattacaaagaaatgttttatcttgtgtaaaatacgtttccagattcaaggagagaaggtgctggccttgagtttcttaatgctcatgctaattgatgggaggatttggccacttcttgtcctcaaagggaaaagaaatctatattttatttgaggagagaagtagccataatgttccccctttctattgaaacctgtagaaaatctgtccctgatgtttatgcctccttagcaaacacccccagtggccccttccttttctgggatcctgttctaaagtgagcttcttttccaggtcgcctgaactggtggtccactgtgtgcacgagctgtaaacggcttcttcctctggccacaacaggggatgggaactgccttttacatgctgcttcactgggtaagctccacagcacagacagagggtggccaggctccaggcctgcgtaaggaaagacatatgctattgaaggaaacactattgaaggaaaagcatacactaaatagagtcacccatgtcactgtcatgagaaagtccccaggagacagagccaacaatcctggcccttcttgtcaagtagcacttgctggagagacagaacacacataagaaaagacctggcgtgatagaaggaggccttgagcatagctgcagggatgggacttagagaccgtcgcctggtacaaataaaaaggacttcctgggaggaggtgggatctttactgaaacttgaagaacttgagagactagaagagggcattgcaggcagggagaccctgcagataaagcataaaggcaggaatggacagggtgtttggaggtaggggtgaacgaggtaaagctggagtaggaagttttgggagcagtgcatgaggttgggtaaatgagggtccactatgttgacagcagtcaacagttggcatggactaatggaaacagacgtaggtactgctcagataaatcacaggggagtcagcatagtcagaatataccacagagagatcagcacacttgtccaatagagacgtgagcttcccgatcacacaaagccacacaacacagaaatatttggataattgaggatcatcatcgactttctggaacctcagttatccctttaggcccagcgttatatgcacaaggctgaatccattttgataggtgagtctgggtttgcaccagggaccatcagggccggttggttcttacccgccctggaggatagcgcctctccaaaacacacaaccctcacacaggaatgcagtccttgtttgtcaaacttgcatccccaacaaacatggctttaactgggtgccatgacctacatcaagggccagcccccagacctctctctctttggacctgcggtgaggcctattcagcaagaggtaggtgagataagactgtaaagggcttcaagggaaatacatcagggtcttgaagggttccagaggaggatggagaacaagggaagcattccccaggcttgacctgcagtgaggaaaggcaaggcagccacttacctgcttcatctccatgtcattggagcacattctgcttgttggcattgcaaaagtactccacattcaccatggtgagaaaatgaaaatcagcgacccccacccagcggcggccactcttaacagtttggtattgtcatcatcttccggtcttttgtctgttcttcaggtgaaatgatgatcttgctgtgttcacagtcttgaatccaacattttcccttacaatctgagaattttccctgctgttatccttcaaacacatgattttaagtagttgggtcttattttatcatagtggataacattaactattcccctgttattgagcatattttgccttgttctttctaaaacctggagaaagaatctaaaagaataaatctctcatctgtgtcaaacagcagcctcattgtgaagtctggggcatggaaatgtttttgtccctcagcaactgcagcatgtagagtcattgtccccatcagcacaacagcggggcaaggccacaccccacagcattttccctgtgagcacagtgggcctcccaggcctgcctgggaagagagagcctccctcaggctggtcatttccatctgcaagagagcctgggccatgactgaccagggctgtgagacccccctccaagaatcccctgtacaacaataagcccagagctcatagcaatctgtcctcttatcccagcactttgtttcattttgtgcccatatagctaaactccgcaggactggggctgcccaaagctgccacatgacattcaccagcagtccttgtggaacccctgttggcctggcctgacgttgagctaggattgtggggcacatatagaaatgacagtcatcttggagtcaggcctgtaggcagatatatgcaggacaaggaggccatctctgcaagagagacctgcccaaggagctgtgggagagtcccagaaggcagctgaaagaggtctgaggatgagcgaggagtgacagtggtcattccccctcccctgccatcctatagaaaaaggcgaagccttgctggctagaagcctgtggcaggcctgggctattgcatatccaaagatgcccagccagttgagcctttgaaaacatcagttcacattactctccttctgtagactctccagaggctcacagttccctcgagagcccccttttcactctccctctctcctcgatcccactttagccacctttccctcttgccttttctcaagtactgccccctctgggtctgtccctggcctttccctgtgctgggacagcaacttggctccttcctccacccatttgagcctttgctcctatgtctccattcacgccacagcagatctgcctgcctcacctctcctcgtggggctgccaccctcaacatcgtacactctgtgccagcctcgtggctatcctcacttcccacttccccacaacatgtgctccatgagattttaggaacttcatgtgtcccggccactgccacatatattcccagcacctagaatgagtgagtgggtgcgtgggtgggtggatggctggatggacggatggatggatggattcccctgtgttttcccttgtagccagagctgcccttctcttgagcacttctcccatgagttggggttcttgatcacatctaagctgcccagagcacattctcagagatggctggtttctctctatatcctctcagcacctggcacagggtgagaccctctcactaggaagcaggcgctctctcctgggccaggtgtgtgcagtggtgtcactgacgctctgcttctcaggaagctgagatgcctcagggctggagaggagggaaatggcagaccctggagaagccaggatgctaatggcctccctcacctggagccctccataaggacactggacagcctgtccctgtcccctagtcagtcccccacccaaatgtaagacttgaataatgaccattaggtcctcaaagcaaaccagcaacattgagaatgggttgccaagggcaccagagaggaaaagcacttgattttcacccactattgttttgctaagaacaggatgtgctgcttcattcacctagttgccttaatgggaagcctcaggaagaaggctggaggggaattaacagaaccgctgagtaaggaggctgttctgcgtgcagacaggaggctctcccagtgggtcgtggtagtttgcatcacctctggcttgtcttttctcatgtcctttctctcctctgttctccctggcctcctggctccaggaatgtgggggtttcacgaccgggacctggtgttacggaaagctctctataccatgatgaggacgggagctgagagggaagccctgaagcggaggtggaggtggcagcagacgcagcagaataaggaggttggtatccactggcatggccagagcccgggacccaggccagatgcagcctcgggccgtggtcgagtccacagcatggcctccaggccccagacagtcttatgaggggaaggcagaaacagcccctgggatcaggaaagtctcctgcttttaagcccacagaggaggagcctgttaaaatagcagagtcccggcagacagcaactatgcgtccacttgtgcttccttaaggcataatcatgaaagctgcctaccttcattcccaaaagcatcctggcttggatgatgaattatatatatgactgcctgctgtcaggtgcagcccatggccccagcccctgtgtgtgagctcagtccaaagggattcccgattgtccccaaccatggtaaacatgaggaccttgctctcctagaagaatctgaacggccagccccagttaggtgcaggcacaggttaatgctcggtcatccccagcccctgagaatgacccttgttggtgggcagattcccagcagctctggaattagagcttggggcttctgaaaatatattgtgcatagcaaaggtggccaagagggtgcagttggtatagttggtagctacctacagatgtgcctggcctgggtcccggtgaggctggtccagattgggagggtgaggagaggagggcagcgcagctgtggcccaccccccttctgagccggctcccctctgccagtcagggctggtgtacacagaggaggagtgggagcgggagtggacggagctgctgaagctggcctccagcgagccgcgcacacacttcagcaagaatggcggcacgggcggggggtaagtgctgcccctgctctccccagaagtcacctccagctccaggccacccagggctacacacagcatggggggatggcacgggggggaatgtgggactcttgtgctgtggaagacagaaagattccagctttccagcattagcttcaagacaaggacgcacgggaggaccgtgggtgatggctggccccgccaggtgctagtggaagggtatgcagcccccacatgcactatgcaggcagaggtgagctcacatgagctgcctccaggccactttccttgaactttattgtgcacaacagttggggtgtgcgccttcagggcacagcaggcctctggaggtcacacgtgatggtgagcattcccacacattgccatcgcacgaacctggctctgaagtttgggttttctcccccaactaattaatttgtggcttcaagaagttgccctgaaagcagaagctcattaagctagcctggtgtttcccagatgggctccatggatattatatgtgttcccagcaaaaagacttcacatctgtgcatgtttaggaatagcttgttcctacagaaacaccttggatgttctagtatggaatgaagaccgtggccagaccagtggggcagccatagagccttggccgcggcttattcttcagttcatattctctggaacctgaaagcaaaggtgttgctcctagagaaggtctcagccaaacatgagaaagtgtgagcagtaacaccagggagacccatggaaggaggattgcatgcagctccaggctgccctcaggctcatgggccctgcagcgggcaactgggtcctcacccacccaccaaggcagggcctagtgcctcatgggccagctctccctggaggccccggctggaaaagaggctcccacagagctgcagctgcagcagtggcgtccaagaccatgtttgaagatgaaatcattagaaacccacatacgctggcacacccttcctccagggctgtcttgtcactgtgttttaaggctatgttatgtccataccaacagtctatcttggcaggacatttgaggacaagcattctgaagactcagtcgactgtggaaaactgctctcttcctctgcacgcctcccgagtcctgcctgtgatgggtcttaagtgttcctcgacatcgttttcacagttgcctctctccctcctgccacagggaggacgcctgataggtgctggcagactggatccaggccaggtgtctctgccagggacagggaggagtggggaaagacagcagcaatgatgactttgatagtgggtgaaaatcaatcacaggtgaccatcacatacacatctcctgagtacccccatccaggaggagcttcgcccaaggtctcatggctagtcagcccatctgactcctaaggccacagtctggtaccctgctgcctgctccctggggcccgagggattcagatgctaatggggacacaggggccacttggtgtctgtccctatctcccacagagtctgagtgatcaaccttaatctaacaaaaggattaggtccctttaggaatatccaaaatggcccagacattgtcccatttatgtaggatagcctggtcccctgcccctgggagccatagttctggctgccacatcacaaaagagaaggaagaacccggggaatggccagagaggggaaactaaacaaccaagggtggatgggagtgaccccatcaggaaagaatggagagatgaggcaggaaggtatgggtggtgttgggggaacggaaggagggaggcgagcacaggtggggtggggtggggtcggggagaccataagagggccctgtgctaggcactctctcccctcctttcaaactctgcctcacaagcctccagtaccccttccacagattcaaaaactgagcctcaatgggattaggtaactgttccaagaccccacaaaaatgataaatggaaggagccaaaaagtcaaaatttggtctgatcattaagtctcctcttttgaccaggctctacagcctaacaaaatccctcaaatacagcagtctgtagaaaggacacagccacctggtccccacagatgccactgatgctcaggtcagaatcctgtgccagtgatgcaggaggcatttctagggtttcagcaacaggtgtttccagtggagaaagaaaaagggaaaaaaaaaaacaaaaaactcagaagaggacagagcatatgcaataggaatctaccaaacagagttgcttctgtagccagatgcctccttgggttacctggaacctttgcatggccagtcaaggagggaggcctttggaaccaggcataaaacattttcctgggaatggggagttttggctgagtcccatggactggggtaacggacagagagcgcctcagcaaggcacccgtgcagctgtgcaggactcgccaacagggtgctccagagctcacctgctccaagaattcacttggggttcagagtccacaagagaggcctttgtgcacaagcacagttgctctgccttttgcctgtgtcttctctccccatgttgagctgagaggtgtagggcatcatctctggggcttgagggctgcagggttgagtttctgacacctgactgaagcacctgaaggcagaaactggcgagctcagggttcacagggctgtggtgggctgtacaggccaggacatggggccgtaggggatgtaaggccaggatgctgcgagctgcccgaggtccaggcatggattcagggaggaggccccaagcgggctggcttcaggactcatctatggtggggaccacacagaagaccagcccctgaggccagggctgagggtggacacgagtagtcagtgagaggagccaccactgcagcccagggacctaaggacacagcccctcaactggcagagagctctgaagacccaaaaaaagcacttcctcagacagcaggtcagcactgggacctccagcgagcccagcgggccctgaaggaagacagcaagaaagactttgccaccctcctgcccctcctccctgcctgtgccggccccacaggggacacagacagcagccagagaaggggaggaggcaaaaggtgaaacagagaagccagctggaagctaacccagtctttcaggaggctcaagcttggggctgatagccccctgcacaggaaagtaaccagaagaaccacacaaaatttccagggtgccacccgggaataggaaagagcaagtcaagggagagtttgcaggcatgatggcgagaagaactaaggtggctttattcatcccagcctgggtttcccagaacctgttccccacggatgagggtaaagggtgcagtgcgggccctgcatcctgctctgggagcccctggtatggagacagatggggcagcccctgtactattggtccttgacacagatgatggcctggagtcattttaaacttgttactttcccagaaagcaactatgtcacgtatctgaagaggtcagcagggaccagagaccaggtgtgggtgtgagctagacctgcttcctctcactgtgcctcccaggaggactcacagtggccaggccccggccacgtggaagaaccaggccttccctagggcttggggagggattagtgaggtcagatgggaatgtgaacagtgtcatctactgagcccatgttatgtgtcaggcaggcctatgagctgtcattatcatcaccaatcacagagaaggaggctgagattcagagaattagataatgtattagggttctccagagaaacagaaccaataaaagacatacatataaagagatctaatgtaggtattggctcacgtgattatggtgtctgagaattcccacgatctggcatgtgccagctggagacccaggaaagccagtggtgtaacacgaaggcccaagagctggagaactgatggtgtggatccagtctgaatctgaaggcctgagaaccaggagtgctgagggcagaaagtccatgtcccagctcaaacaggtttggttattccgccctccgccactgttttgttcccatcatgaatagatcagatgagccccacccatattggtgaaagccctctgctttctgctctccagcaattcaaatgctaatctcacccaaaatgccctcacagacacatgcagaaataacgtttaaccagctatctaaccatcacaggttagcttccaatgtcccacagcctgaaagacacaaagccagaacctgaacttagaactgaccaaagaaacctaagcccacactcttgacaaatgcagaccaggcatgaggagtaggaatcaacaacttatcttgactatggtgaaaataatcatttttgttctttaaacttttaaaagaactacttatttgttttctgtttgatgagaagggctaagtggaagctgagaggccagtccgacagacaaagaggagaagagagcagagcaagagggaccgtttgggggaccctctggcagcccccgggggcatcttctgtctaggtccttacttttctcacatgctaacctctctgctttctctttgtagttgagtttctgaaatttcactgacaatgtgtttgctgcatttctttttattagcttttttcggaagtagctagaatcccaagtgatttcctagcacacagtctgagagttgtcaatttcagtcagtcttttgaggaaaagcaagaggcattttattcctgggagatgcccacaccacagcctggtgctcccgggccatgggctggccttgtgaaggaaaggaggcattcttatgtgtattcctgaaggtgccatgacttccaccagcagaccaagcagaaagagcatctgctaacgtaaggtgtcctcactttgcagatgtgggacccggctcaaatttttaaagacatttctaattgaaaataagaccaaagttgactatctagggatggttctcaagtaggagccttctctgatcttcctgtctaaagaatccaccttttatcactctactgagagttttttattattttattatttatttaaatatgtttaggggatacaagtgcaggtttcttacatgcaaatattgcattgtggtaaagtctgggattttagcgtacccattacccaagtagtgaacattgtaatttttcagtcctcacccccgcgaaccctccggcctgtcatagcttccagtgtctgttattccattctgcctgtccatatgtacgcgttgtttagcccccagctataagtgagaacatgcagtatttgactttctgtttctgagttatatcactgaggataatcgcttccatatccatccatgttgctgcaaaagacaggattccattcttttttatggctgagtcatattccatggtatatatatacattttctttatctaatcctacgttgatggacacttaggtggtttctatctttttgccattgtgaatagtgttagagtaaacatgcaggtatctttttgatagaatgattcatttccctttgggtatatacctagtagtgggattgctggattgagtggtagttctatttttagttctttgagaaatctccacactgttttccataaaggttgtatgaatttacattcctaccaacagcatgtgttcccttttcattatatcctcaccaacatctatttttgtttttgttacatttgcttttgaagacttggtcataaattatttgcataggccaatgtccaaaagagttttacataggtttccttgtagaatgtttatagtttcaggtcttacatttaggtctttaatccattttgagttaatttttatatatggtgagaagtgtgggtccaatctcattcttctgcatatcgctatgcaattttcccaacactaaatagtgaatgacgcaaaatgaatagtgtcatttccccagtgtatatttttgttggtgttgttgaagatcagttggttataagtatgtggcttcatttataggttatgtattctgttccattgatctatgtgtctgtttttgtaccaataccatactgttttgtttactataaccttgtagtacaatttgaaattagatgatgttatccttcagctttgttctttttgcttaggattccgttggctagacaggctcctttttagttccatatgaaatttattgttttttataatcctgtgaaaaatgacattggtaacttgatagggattgtattgaatctgtagattactgtagcaatatagtcattttaatgatgttgattcttggaatccatgagcatgggatgtttttccattcatttgtgtcattgacaatttttttcttcagcattttgtagtcctccttatagagatctttcacatccctggttaaatatattcctcgatatttttgtagctaatttaaatgggattgccttcttgatttagtcctcagctagattgttactggtatatagaaatgctactgctttcattatgttaatgttgtatcctgaaactttactaaatttgtgtatcaaatataacaggtttttggtagagtctttatggttttctaattataaaatcatatcactagcaaacagggatgatctgactccttcttttccaatttggatgccttttgtttttttctcttgcctgactgcgctgtgggtacttccagtactatgttgaataacagtggtaaaagtgggcatcctcatcttgttccagtccttagaggaaaagctttcaacttttccccattaagtatgctgttagctgtgggtttgtcatagaagacctttattatgttgaggtatgttctttctatgcctagtttgttgaggattttcatcatgaagtgatgctgaattgtattgaatgcagaaatccttgacaaaatactagcaaatcaaatctaacaggacatcgaaaagataatacaccataatcaggtgggatttatcccaggaatgcaaggatgattcaacatacacaaatcaatgaatgtgatatatcacgtaaacagaattaagaacaaaaaccatatgatcatcttgatagatgcagaaaaataactgataatttcttatttgatcatgtgttagtatctctccctacctaaacctgcattcatgggcacacatgggcaagtgtgagtgcgcgtgcgtgcacacacacacacacacacacacagcacagtgctagacctgtagtggataatcagtaactatttgtcacatgactgacctcagcttattgatcctaagcaataagtcttgttcctcaagccacactggccactgctagaaggtctttcagagcctaagatccattcagtcccttcgaagcactgggaggcccccgtccttccatctcagcttcccaggccatagctcttagcagagtccctgctagcctgtactgtgcctttggagagtcttttgtaaaaggtgcctgtctgggcaggcacagtccttgaccaggggcaaaggcccacagcaggacataggctgggttcagccccttgagcctcctcagactggctctgctgtgcagggccctacctgagagaggggttgaggcacacctctcagaaatgctgcccatgagatctgtgcatgaggagaaccttgcacctgtgaaaaggagtaaggaccatccccacctactgtgctgtgggtgtctcaggatgcatcaggaggaggaaaaggcagtggttggactagtgagtataaacatgctacctagaggtgggaggatgtgtgcatacagtttatgcgcatttactcacattcatacgtgtgtgcacacagatgtgcacttactttttttttttaatcagatggagtctcgctctgtcacccaggctagaatgcagtggtgcgatctcggctcactgcaacctccacctcctgggttcaagcgatgatcctgcctcagcctcccgagtagctgggactacaggcacaagccaccaatgcctggctaatttttgtatttttagtagagacagggtttcaccatgttggccaggatggtctcgatctcctgacctcatgatccacccgcctcggcctcccaaagtgctgggattacaggtgtgaaccaccacacctggccttgcacttactttttttatggaagggtacaccaaaaaccaacacctatgtccccataggtgaggtgactacaatttatcatccaaactggttcatttgggggaaggaaagtgggcactaaccacttgggatgtgtgaacaggactttcccaagcaaaacaggaggtgtggacaccccatctggaggaggggatatggggagggacctgggaggcttcatccaggctctccgtctgggtggctgggtgactgccctttaacaagacctgccggccccagactggcttccttatctatgacacgcgctcttgccgaggatggtctccaaggatggtggctacagcttaagccagggtgcccccaaactgttccctggggcctgagataccatctggaccttgctccatgacctttgcttcttggtcctgccaggagggactcctcagcctctgcccacccccatctttctcagggtgttttcattgggtagacggtatatccctaaccctggaaattctccctcctcaagtacccactggagaagcagatgtaggtgccctggagaactcagtgtgtggggcccaaagcatgttaggaagttctcaggacatgcacatcttggaggatgaagtcattatattgcatgtcagtcttctttgcagtaagcactgatttttaagcattttaggaattgttatgtctttgcccagtggccagattctccccacaatcccagatctcgcatttgctcagcaaactcacaagaagaagacatgaagtctcagggctaaaagtgggagtgaattttcagaattggtttttctgaaactgatttctaccaatgggctctggtcacagagtgcaggtcacagttccaaactctcgtcccagataagatcttgtttgcccttcattttagagcccccagctaaattggagttccagtaccagagcagctagaaaacctgcaataaggagaaatgaaaagggacctggacataggcgtttacagtgtgcctttcatgggatacttctcttacctggcaggtgtcctaatgcctggttgcctaacccatgacccatgtccctcacatgggaagcttgtttgtactggcagatggctttgtggctcctgtctggcctgtgtctagttttttcttacctgaccatcgctctgtggctgggaccagccttgtgttctccttggcgtctggtgaaaacatggcctggggtagcctctgcttcttccaaaggaaggtgcaaattcaatccaccgccacaatgggaagcaagttcaaaggtttttacttatagatcctgggcatggaggccatcatgagttgggagggcagtgctccatcccagggtcacattgaggcagggattaagattcaggcagagagatccaactagaaatatatataggggaataggatgtgggtcactttaagttcatgggcaaatgtctgaatggtccatttaaaggaagtggtgggaaagtggaaagcccagtctgctaggcagagagtcgcctctaagttcttatctctggccaccagcttgggtctttgggtgtggtgttctacttctaatgcccaggcagcaacctctgctgttttgtttctgttacaccctctacaccctcaggtgctctctggctgccttcaacactgaggctcctggtatagaaccaggaccctccctaagtcttggacaaggagccagaagcaagtagggaacatcattatgattttcaggctgccccccgctggagctgggatcctctccgccaccccctgggtcactgagcaggtttcagttgctcacatggctcccatgctcaacaccaaaactggaatggagaaaggctgctctgctccagctgtcctccatcacctctcaactgggcccgccatcctatcattgctgctgaaataaaatggccctgccttaagttagccatgaaaagaatgccatgccagtacaatggtgcctaatacttaacctttgcaccgttgttaccttggaggccctcttgcatagctactcaaataccagagtgttctgccaggaggctccatgctgggcatggtccaactccatgcctttgccctagcacagaacttgaaggacgggtagatgaatggacagacaagtaggtgcttgggcagatagatggttgaatggaagaattgaaggatgagtacatggatggatgcgtgcgtaggtgggtgggtggatggatggatggatggatggatagaggtacatgtgggtggatggacaggtggatgggtgggtgggtggacaggtgtatgggtgggtggatggcatggatggatgaatggatggacagatggatggatggatggatagatggacatgtgggtggatggacaggtggatgggtggttgggtggacagttgtgtgggtgggtgggtggatggcatgaatggatggacagatggatgcacagacagcagatggatggatggatggatggacaagtggatgggtggatcaatagatggatggatgaagagagagagggagggaaggaagagagatgggtgggtgggtgggtagatggatagatggatgaatggatggatagatagataggaagaaggatggataggttggtagatgttacatgaaggcagagttctctgagggcctctgcagtgcctttcacagcaccagtgtatagtaagtgctcaatgaatatttattggttttttggttggaaatatgatggccctgctttaagttttgcatgaggagaatgctgtgccagtacaaaggtgcccaatactgagccttcacgctgttgttaccatgggggtcctcctgtgtagctgctcagatcccagagtgttctgccaggaagtgaagatgggactcagaacccaggcctgagagggctaccattcaccttgctctgcccgcttctcagtattagtacctgactcaagagcagctcctctctttccagcactgccccctccattccttgaattagggaaggaacagtgctccacatttctagctggggtatttctctctccaagtatgcaggttttaactccatattctctccccctgtgctgttcattatgttgttcaaccattcactcgccggcactcaacgcatactaggtgacagggacaaacaagcaacttccaaaagcacttgaccccccaggcactgcagcttggctttcaggtgtggctgggcaggctaatcacctgcagtgtttcaaaatgcacacccaggagcactgcatttagacctggcataaaatatatgtgtgtgtatgtgtgaatatgtattcatgtcaatacatatttaaaacattcctcttctacttccctttccttccttgctgaaaaagtaagttctaaagccattaggtggggcaaagcaaggtggcatctggagtgggtgggggatgggaggacaccaggggccagagccagatgtcagccacacaggtgaagagggccacctcacggatggggagcagaggtgggagatggctgacatatgggaagactgatcaaataaggaaatgctttagaatgaatacgaacaagttttctgaaagtaagtgaagaaagttgcaaatagaattaactttgtggggttggattggaattggaggtatcagtgaactcaaggttttctataaatattgagagggagagaaagatgaaaataaacatggagagggagagaaagatgaaaataaacatgcaaaaatatgtatccatgtgtgagtgtgaacttgaaccatctttttgcaccaggaagcaagaaagtgctctaagaaatgatgggagctgggcacggtggctcacacctgtaatcccagcactttgggaggctgagacagaaggatgacttgtgcccagaagttcgagaccagccttggcaacatagcgagaccccgtctctacaaaaatgaaaaaagttttctgggcataatggtggcctgtggtcccagctacttgggaggtcagaatgggaggctcacttgaccccaggagttcgaggctgcagtgagctatgatctcaccactgcactccagcctgggcaacacagtaagaccctgtctcaaaaaaaaaaaaaagaaagaaagaaagaaagaaaagaaaaaaagaaatgatgaggatgtcaaaaggacacagatccagctttagagaagccacactgaccacatcaaggagtatctgagcatccacataatcacactaatggattataacccactgaataaaatggaaaaccagaaatccatagtgataccaataaacctataaagatttggtgaggaatggagtatttgcataggttcaagttcctctccacaaaatgcttgttaatttcaaacgaaaaattagtagtctgcaggggcaaggcctggaagatgaccttaaggagtggtccaggtcaacctcaccagtgatgggacaacctcaccagtgatgggacaatctgcagttcacacaacctgataagatgtcacaagaaggactcagcttgacccaatccaatctaactgtgaggaaacagagaaacccttatgaaggacattctacaaaatacccaacctgtaatcttcaaaaatgtcaaggtcatggaagtcaaggatatcctgagaaatgttccaggtgaaggagactaaggagacgccaccgctgaatgcagcacctgatcctgagcaggaacctttgttctaaaaggcattattgggacagctggcacacacacgtggggtctggtgattgcatgtaactgtgtgaattcctgatgtcggtagccgtgtggtggttgtgtaggaggatgttctgttcatagaaaatgagcaagaactttccagggtgatggggtgccaggttggctgtttattttcaaatggttcagggaaacaaaagctctttttactgtatgtgcgcaactattttgtgaggtttcgattgctgccaattttttgaactgttaaaataaggttaattgggttggatgtggtggctcatgcctgtaatcccagcactttgggaggccaaggctggtggatcacttgaggccaggagttcgagaccagcctggccaacatggtgaaaacccgtctccactaaaaatacaaaaaaattagctgggcatggtggcaaatgcctgtaatcccagctacttgggaggctgaggcttgtaaaaagtaaaatagaggttcttctttaaagactttcctccccatctagttaaaaataaatagtaacttcttttagaagcaaaatttattcaaagacctgtgctaacattcttaaatatctgctagccataataaaaaaatcaacatactttatattcttagctcccacaatttaacctaaatatttgccttgcatacttatactagtccaagcaagcactaagtcatagtctggtcctcttccttctttaaaagcatttttacctttctcaacattccacaagttacttcctccttcctttattctcctctgcatttgcctcttttaaaaaattctaagttactaaccaatcaaaacaaatacaaaatgtaaaatcccgttccagccaataaaaaccagacacatcagtaaggtggacacgtcaggttataaatgaccctgtctcctttattcaatatactctcataacaaaactgctggcaagtacaccctttctacagaaaataaaaaatggcctcgctaaaaaaaattaaatttatattcaagtaatattgctttacgacaccaggaaacaaacatttcaaacaattttggtgacccgtatggggatacattctctgccgggggtggtctccagtccctcctcataagggagcgtgctcctctgccacattgcagtggcctcaaggataagagctcaaaacccacccggtatgtggaataaactcagagtctcagcaatgcaaaaaaaaaacaattcctcacatatcacgtgaaccagaaaactgtgcacagattgaggaaaaaacaccaggaaaaaacaccggtaaagtatttccttagtaatcaagactgaggaaaaagctgcggggcagtaaagcattccttagttaaaacataccaaggagagagaaactgcaggggcagtaaaacattccttaggactagacacaaaaagccatgggaggtggtaaaatatttcttagccaggatgtcttaaaggttaaaaaaaggtaaaaaaaatccccactgagtgggggttaaacctcaaaaagaggtgagaaatccccatgggcgggggggttaagcctcaaggtaaaaaatccccattgtcgggggttaaacctcaaaaagaggtgagaaatccccatgggggaggagttgaacctcacacaaacctccgatagtaaaatatatatacatatatatgtatgttacatatagatatacatatatatgtgtgttacatatagatatacatatatatgtgtgttacatatagatatacatatatgtgtgtgttacatatagatatacatatatgtgtgtgttacatatagatatacatatatgtgtgtgttacatatagatatacatatatgtgtgtgttacatatagatatacatatatgtgtgtgttacatatagatatacatatatgtgtgtgttacatatagatatacatatatgtgtgtgttacatatagatatacatatatgtgtgtgttacatatagatatacatatatgtgtgtgttacatatagatatacatatatgtgtgtgttacatatagatatacatatatatgtgttacatatagatatacatatatatgtgtgttacatatagatatacatatatatgtgtgttacatatagatatacatatatatgtgtgttacatatagatatacatatgtatgtgtgttacatatagatatacatatgtatgtgtgttacatatagatatacatatgtatgtgtgttacatatagatatacatatgtgtgttacatatagatatacatatgtatgttacatatagatatacatatgtatgttacatatagatatacatatgtatgttacatatagatatacatatgtatgttacatatagatatacatatatatgtatgttacatatagatatacatgtatgttacatatagatatacatgtatgttacatatagatatacatatgttacatatagatatacatatgttacatatagatatacatatatgttacatatagatatacatatatgttacatatagatatacatatatgttacatatagatatacatatatgttacatatagatatacatatatgttacatatagatatacatatgtatgttacatatagatatacatatgtatgttacatatagatatacatatgtatgttacatatagatatacatatgtatgttacatatagatatacatatgtatgttacatatagatatacatatgtatgttacatatagatatacatatgtatgttacatatagatatacatatgtatgttacatatagatatacatatgtatgttacatatagatatacatatgtatgttacatatagatatacatatgtatgttacatatagatatacatatgtatgttacatatagatatacatatgtatgttacatatagatatacatatatatgtatgttacatatagatatacatacatatatatattcaaaactcccctttcccctcttcttgggggaaaaaaaaaagactaagctccactcctgccagtcgctcctctaggggaaggggaaaaaaaaaagcaaaaacaccaagcatgacgccagacagccaggcacaccaaaaattaagtccctctccccacccgagctctgtgtgaaaaagagagcggggactgtcgcagaaagaaaagccaacaagatgaaaggacctaactcttacgactaacgacaggtgtctgccaagcctgtgggccagtgatggccctgggccaggactgcagccggccgggggccaagactacagccatgcaaatcccacccagcccagaaaactaagtgtagaaaaaataaataaatcagggaaaaaaaaaaaaaacaggggaaacagacggcagcgcatacatgcaggcggggcccgtcccttgcccagcctgcgccgcaagaccgggaaaaaaaaaggaaacaaaaaatgacagagagggagagaaaaataaatgcaaattaaaaaaaaaggaaaataaagtgcaaataagaaaaaaaaatagaaaaaagtaaaaaaataactagaaaagacaaaaatcaaagaaagacacggtaaaattaggaaaagaaataatgtaaaaggcagaacgttaaaacatgttaaaaattgtctataaaagtcataaaaagttataaaaaaaatttatgcaaaaaatattacgtaatttaaaagtaattaggcctcctaaatgtaaaactatttaaaaaacagtttatacagtttatatacaaaatatgtaaaaatatatacttttaataaaattacaaaaagacataaaaatatgaatttttacctacattaaaaggttaaaaaaattttgttttaaaactttaaacaaggctgggcgtggtggctcatgcctataatttcagcactttgggaggccaaggcaggcggtcacgaggtcaggagatcaagaccatcctggctaacatggtgaaaccccatctctactaaaaatacaaaaaaaatagccgggcatggaggcaggcacctgtagtcccagctactcgggaggctgaggcaaaagaatggcgtgaacccaggaggtggaatttgcggtgagctgagatcgcaccactgcactccagcctgggcaacagagcaagactccgtctccaaaaaaaaaagtttaaacaaatttaaaaatattaattataaagaaaattctgtatgtaaacatattagctaaagaggtatccaatttttctgtaaactaaacattaaaataaaagcacaataaatttttcttaaagcactaacctgctctttaagaaaaattataaaaagttttaaaaagtctataaaaaccttaccttatagtcagacattaaaagtaaataatgtcttcaaaattttattaaaataaagtttaacattaatagcacattaatgttaaaaaacataaaatcatacaaaaagcattatcaaatataaaatagtgcttaactttctcaaagcccgagggcggccgaataagtcacaaggcccctcatccccaaggccacaacgcgcaggggcggtgaaggccacaaaaaagccaagaccttaagagggggcagggccacaatgtcccctaggcaacgctaagcagaaatggagcagaagacgtcaccatggggcctcaagccccagaatacgcaacaaaaattatatacgtaatttatcttccactttccctttcctcaaaactaaaaatcttttaacacaggtaccaaccctaaaatttctagtacatcagcaccagcctacaaaccacattcttgcctggcgcagtgcctcacgcctgtaatcccagcactttgagaggctgaggcaggcggatcatgaggtcaggagatcaagaccatcctggctaacacagtgaaaccccgtctctactaaaaatacaaaaagaaattagccgagcgtggtggcgggcgcctgtagtcccagctactggggaggctgaggcgggagaatggtgtgaacccaggaggcggagcttgcagtgagcggagatcggcgccactgcactccagcctgggtgacagagcaagactccgtctcaaaacaaaacaaaaacacatccttatcaaaaaataaaaaactcaagccagcctgggaaggaccctattttatgctgttaaccactaagacccctgtccacacagccaagaaaaaaaggacccactatactcaaatcaagaaaacatcttaggttactatactaaaatcaagccctactaagttaaaattttaaaaagcttaattttcatatactttctctattacttcctttcctttccttattctgttatagctcccttgttattaatgtaactaaatctaactcacctcaaaccattgcctttaatgcttgctctatcataccttgtaaaaatattaaaaaatcaatgacagctagccttttcacacaaatatttatgtcctggccctctaattaacacaattacccctaacacttattgttataatcacctgcagccaaaacgccaattttctgctcctactgagaggtgaagccagctggacttcctgggttgagtggggacttggagaacttttctgtcttacaagaggattgtaaaatgcaccaatcagcactctgtagctaggactgtaaaacacaccaatcagtgctctgtaaaacgcaccaatcagcagaatcctaaaagtagccagtgacagggaagattgaaaaaaggacattctgataggacagaaatggaacatgggaggggccaataagggaataaaagcttgccacccccgccccccagccagcagcggcagcaacctgctcgggtcctgttccatggtttagaacctttgttctttctctctccacaataaatcttgctgctgctcactctttgggtccgtgccacacttaagaggtgtaacacgcgacttcattcttgaagtcagtgagaccacaaagccactggaaggaaccaactccggatacactacagcctaacaaccttataataaatggaacgacgtcctttaaattactcaagagcaaagttaaacttccacacacacacaaaaaaaacatacagatctaaaacccttcatctatttcattaaaaaacctacccaaccttctcaatataaccctgtccttctgtcaccacctccaccttaactaactctaaacctacccttaatcacttctataatatagaaatttgacataaatttttaaaaaccctaaatatttttaaaatacacattattcccccatcttccccttcttcagtagcctaagttctaaatccgacaccagttactcctgcatctaataaaagtagaatgcctattataaaaataaaaaattaaagacagaccttagccatcaaaacaatacatcaaaatacaaatgcctagctaaaatattccattcacactttaaaaacaattattacactattacatttgtacacatggtactccagaggcccaaattatcccctttccacttaaatggtcacctcatcaaccaaatataaactatatagtagctctttttcaaaatcccactgcttaaaataatccatcatgccaagctctctctgctatttcctaaaatttaacactgtgcgggtcagcccctgaggacaatccagcttgcaccttttctaaatgccaaacttacactgtgcctctcatggcaagaaaaaaatttaatattccttaaaagcatttaaaaaatgctttttccaaaagctcgcccatcaatccatgcttagccatccccaagcaaatatatggtagtactgtaaaggacctttactaaacgctgtgccaaatatttgaaacagtactaatccagttagctgtccttcactctagcatttcatcaatctaaaaaaataaaaacaaaacaccgcaggccaaaaaaaattccttgtaagtcctttaatcctcaagtttatataaatgctattaaaatcctgtaaaaaaaatttcaaataaatttaaaatacaaaatcaaatagctgcaaaatttaagtccacgttattctggtaagtatgaatttaaaaaatgtaaactaaactgtatctgttacaatcagcaacaattcataaattacactgaaaacgccatcaaaaaaatagctaagcaattaggacctaccagacaaattgccttaaaaaaagctttaaatataatatcagcaaaaaaaaaaagtcataattaaaactcaatattgtacctttattcctaatactgcccctaacaaaactataacaaaagcactacaaaaattaacagcactatccaataaacttgccaaaaattctaaaataaataaccctttttctaaaataataaaacattaattcgataagtaaaaaaaaaaattgtggccaggcatggtggctcacgtctgtaatcccagcactttgggaggccgaggcaggtggatcacgaggtcaggagatcaagaccatcctggctaacacgtctctactaaaaatacaaaaaattagccgggcgtggtggcgggcgcctgtagtcccagctaccagggaggctgaggcaggagaatggcgtgaacccgggaggtggagcttgcagtgagccgagatcatgccactgcactccagcctgggcgacagagtgagactccacctcaaaaaaaaaaaaaaaaaaattaacttcaattctcaccttgttcgctcttattaatatacttataagctattatgttattccctgccttcaaaattttatacaaaaacttatctctaccactcttacaaagttaactcctaactctcctccaccctattcgaaaaattacttctcttaaagctattaaaacagacaaattaaaaaaaaattataagagggagaattgtaaaaagtaaaatagagttttctcttcaaagcctttcctccccatctaattaaaaataaatagtaacttctcttagaagcaaaatttattcaaagacctgtgctaagattcttaaatatctgctagccataataaaaaaatcagtatactttatattcttagctcccacaatttagcctaaatatttgccctagcatacttatactagtccaagaaagcagtaagtcacatcctgttcctcttccttatttaaaagtatttttacctttctcaacattccttcctttattctcctctgcgtttgcctcttttaaaaaattcaaagttactaaccaatcaaaacaaatacaaaatgtaaaatcccattccacccaataaaaactggacacagcaataaggtggacatgtcaggttataaataaccttatctcctttattcaatatactctcataacaaaactgcgagcaagtataccctttctacaaaaaatataaaaatagccttactaaaaaaatttatattcaagtgctatttctttacaccaccagaaaacaaacatttcaagcaggttgcattgagctgagataacgccactgcactccaggctgggtaacaaagcaagactctgtctcaaaaaaaaaaaggtaaattgagtcataagaaaaagaaaaaacatgggtagtatgtaaccaaaattccacaggtgatggtaatgcattccctaggattcacaccctgcattctggaagtcccaggtggctgggaactgtgcccatgaacccatgaagctctttccccaggccatgccaggggccacatttgccagccctggccccacctgctgccgtcagctaattctgagcattcctcaaacactcaggaacaagtctgagagccacctctggggagtcttggctggtgctgtcatctcagctggcaggcactgcaggtgcagccgaggctccataacgctgtgagctctggctgtcctctcaacgtgcacctcccttttgggtggccttgctatggggggacatcgaggctgccaccttctgcccgaacgtcttagggtttgagtggaagcattcttgagcctgcggtttccctgatcctcagacgtgagcctgggcatggtcagggagggtctgggccacctgggctgcacattcacatcgcatcccctccagctctggattgaaatccagacagccttctcactgttctcctccattggggtgagtgtcttctagaaggctcctcagatcttggtggtaatgaccccaccagcccatcagatgtgcccagggaacccctgggtccctgagagaaataaacaggagaggaacccctccatccctctggcccccactgcttccttgtgaaacacccccagaaagccaatagccctgctaccacaggctctggtgggctgcctccgcctgcagagagactcgccttcacagcggccggcacccttcacctgcgggctctttccaactcatcttctgagaccgctcccacggtggggtaggggagctgggacctgtgcatttgccatcggcggatggcatgagaagtggcccaggatggcgcagctgccggggtccatgaagataatatccagagtggggagggctcagcccctgcatgaagcagtccccactttctccatcctccaccctgttttagtcagtgaccagctggctctgttttgtttcacagtgtggacaactctgaggaccccgtgtacgagagcctggaagagttccacgtttttgtcctagcccatatattaagaaggcccatcgttgttgtggcagatacaatgttaagagactcaggtggagaaggtaagttcctcaaagagatgtgttgtattcatgacacagaaagcatagcatcccagctagaaagcagatagcacagcacaaggtcgagctcccagaggccacaaagcatcactctgtgcaaagatctcctcgacgtgtttctttctcctccctgatggcagcagagattgttcttgactagctgccctgcctatcaacggcaggtggccaggagaaatctggtcatgtgaggaccaggaccaagcccagaggggctcctgtctcctgtcgtgtgcctagggcatagcagacagcccacacccctccaacagccctgggccatgtcctggaggcactcagtcactcaggtgtgttcccacccctccgcagaccacatgtgtgttaaagactaaaaagaaaggaagacagaatgcatagagtcatttggcaaaagctatggtagaatcagaactggcagagaaagaggcaagggcagtttatggcctgcccaccaaaagccacactctgtgcacagccccttctagaatgttcctccattcagcccttgctacaacctcccagggtggacaccaccctccccactttacagagatgaaactgaagcccagagaggctaggcaatgtccccagcggggatcagccaagggcagggagtgatccaaagcctgtcctccctccagcgtgcagctgcccagtttgaatttacacctgcaccttaacaaaagtcataggtcttccagggagctctacgaatcaggatgtggctcttcacgctaaatcacagctgccataaaaaatctgatgtggccacgatggttatgtagccagggaactggtaggacacaggtcctgcctggcccacccccttccctgtgtggctcagggacgcgggcctgctgaggtctgcaggtctccgtgcaacaccagggcttgcatcagggcactgctgcgtaagcccaggactgagctcccagcaccatcagatctctgagttgcggggcagaggaaggtccacgcttcctaccatgctactcacagccctcttgcaggtacccccaccctgtcgcctctcagtctgactctcctgtgagcacagtgatcaatttagacaaagtgaggatggcggaggaactcataagagttcatcaaagacatccctgaaattaccgtccctgaattctgctcaaggagtgcagcaatacactcactctagggccaaaagtaaagacgtttcatgacctcaaagcagatgctgctttaggacagatatttccagaagttattctattttgctgagggtgttaggcttttctgccctctttttttacaagtaagaaaatgagtgaaattgtgtccctgtcactgaaggacttgatccctctgattctcagttcccatctgacttacatcttggtcctggagctctctgactggttccttcaaattcaatagaagaggttctcaaaacatagagcaaatatacacccttgagaagcgcacatactctgttgtatacaaatgctttaccaaacactaggaaaggaagaagtacatccagaaaaaggtgggcttccaggctgcaactgctctgaccaatctcgggtgactgtcatcccagccctggggctcctgtacacctgtgcaggtctcagggcagcaggagtcctggggcagacagatgactctggaaaccctcagccccatccctcagcaccgcctccatccacccctcctgtccctccgcttctccacggagtccccccggggtagtgagggacagggatgcaggggcctcccctcccagctcgagctggctgctcctcacaccctcaccctggtttgtgtccacagcgttcgcacccatcccattcggagggatctacctgcccttggaggtccctcccaacagatgccactgctcgcctctggttctggcctatgatcaagcccatttctctgcccttgtgtccatggaacagagagaccagcaaagagaacaaggtatgcctgtctcccaagagagtgcacgcaggagcctagggtgggggcagagccatcagaagggaccccattgcacggggaggtggattgtggagacccccccttagaagcacacctgtgcacactcagcagtgacagtttttgcataaagctaccttatgcatgtgtgaacgttttcattgaaaataacaatgttaaagacaacattctctttaaaatactaaacaaaggcaacctacccttaaatagcttttactgttttccctttcacatgtatacatattttataggaatgcaattagtcttagatataaattaaagggaaaaaaacttcaaaagcaagtattaatgaactatggcccaccacccattttataaataaagttttattggaacagagccacattcattcacagatgcatcatctgtggccgtttttgcactacagtggtagagagaggagcagccacagacaccaaggcctgcagcgcctaaaatatttacttactaattagctatttatgggaagagtttgctcacccctgctccagggtaagcttttaactcaaaaggtcaacatttcctttcaaagcattgcagctgagtttcctctaagcagccatttcagtgctgctgatgttgggccagcccacaggctgtgcactgcacaattccagggcaccagtcaatgtctttactggggaaatagggggattttgtttggaacaattgctgttttctcatgttagctactgatggatgtgtgaccagctgagtggagaggaaaccccttcctgttgtcattcttgtttgtagtataggcagagactcactcccccaggggacagacggacaggcaagaccaactatttcagagtccctgccattaggtatggtcccagagaatgggaagtgccctgtccagggccaacagggggaaggaagctcaggggtgtctgcttctgaccttttccactgagtgtgcagctcaggaagtaaatatagcaacaagattgcacccctaggactcccaaatgctactccttcctgtagacagctgggaaggaaaggacacagacaaatgaacagaacccagcctcccccagccctccgccagaggcggcaccagcgtgtcacttcctggcctggcagttgagtcgggaatgaggctggggctgtggagcagaagctgaaggtgagaaatgcacagggcatttgagaccccttcccaagagcagatgcagagctcccaggagctgacatgcgtggtgcagccgcagaacccaagtcacaggaagagagacgactggaggctacagccggccgtgacaagaatgtcacatcatggttctttattatttgcagatgtggcactggccacagaaggaaagatttaatcagtaaggcctcggaggtgctccggtctttccattgtctccccactttcaatccggaatgcggaatgcctgcacctccttcccggggatttagctcttcgtagggctgaccccgcctcttgggagaccagaagggccttttcaggacctgggatcggccaggggcggggccctctgtccagtccccagggagattctgtggtcagaaggtgatggtcccaaggccagcgtctcccagttccgagcatggggttcagatacccgaccccctcctcgcaaaaggcaccgagtactcttccaggccttccagatactgctgcttggtgttttcaaggcacatatgaaagcatcctcccttcaaaggatgcccatggagggcgctgtggcttgggacctttcaggagggccttgcagagttgtgggtggtttcacttctgatgacctggtttctaaaaactgggatctggtcccagtgcacctctcagagccactgtggtgtgggtctttggctccctcacagtcaaagcagcccactgggatcctcctggggcgatgcaggtccctgcctctaagaccatcctgtggccaggctgcacattcacccataaggtccccacgacccactgcagggcaggtgccatggccacgctctttgtcacctgcacccttgtgcccccttagaccttcacctctgcagccttccctctgtgcctcaaaggacactgtggggacgggacagagtcccagctgtgctctcaagtcacacgacatctcagcagagagggacgtggaaatcacagtgaggctgcagcttccaggatgagctgcagactcaggcctgctggagtgagctggccagaccgcaaagtcgcaggacctggtgggaggcaggagatgggagactccagaatatcgagccccaggatgccaccggcccccactgtgaagcacaggtgtcaccctctgccatggtaccctgtccgtcctataaacagcaccctgtgacagaggctaatagatacaataatcacaagccccaggaagagcagacaccgcatccttgtgcctgcggaacgatgctttgagagcctggaaatgagataaaaaatgtatttcaggctgagacaaggctcccttcttcccaccacccacttcctcctcctctgtttacatgccccatcatgtctcatccacatgtgtccagctcctggaggcttaaaaatccatgaagcattctttaaacttctcatcgagtgcctctccctctaagggaagccccctcttataggtgctactgccgtggcccggctactgctgatgccgccactgaccatcttcaagttcaggaatcctcccatttcccaggctaggcatgcaacatggggagagggaagggcttgaggtggaaggtcaggagctggtgggactggtcagctatgggcaacctcagtggcccaggctttgcaaatttatcttaggactttttagataaaatgtatgcattctttcttggtagcttccacacatgatggtcacctgctttctcctggggaggacattagtcatttgctccctgacaacctgagccttgggccttcagctttttgcaggaagcagcctccttgcagccacatcttaaaatggcctgcaggggagctctgtgaaacccagatctgggcattctctcagcacccagctcaggtcagttcctactggccactgagcaaatgtgtacattatgaaaaatcaaatcaattaacaggagaagcagaggtgccgcatagttcctggaaacatagaacctaggaaagaactttggaatcatccagtgcaacaatcccaactcccctccttttatagcaaacattgtccagtgtactcttcattaccctgaaatgaaattcatggataatgttacctgtgttggaataaagtccatttagtacccccacatcaggagaaatcaaaggaaaccaatgtaataaaataatctgcatttctgtaaatattctcacacagccatactgcaaaactcaatgaagcaatcagatcctggcacccatatgtggggtgcccagttacacagagaggggacacaggtgtgctgagcataccctcaaataccccaggaggctctacagtccaaaatggcagctaactcttggtaaagtcccaaacaagccaagcacagccttgcccatctccacagctcctcttccctttgggtggatatagagccgtgcagagcatacccatgtgtacatgttagctctcggcctggccagcaggttgcactgggaagggctgggtgcatacaggtgctgcctaggtctgcaccccaccttcatgctcatatatttgcaggtgcttcctgtgctcaagggctgttctaggtcctttccaggaatacctatttaacccttcccatttcctcttccccactttacagagggggaaattgagaaaggaggaaccatccccagggaatagttgcagccagtgaagggttgggagggtggatggcgaggcttccacaaagacttggcccaagagagtggcatctccaagagaagaggctcaggaagtggtaccccaagtcaaagcctgcttgggataagatagcgtctcagacccaggactcaggaaccttcagggtcgaagagggtagggagggggtgctttgtttcatggaaggtgtcaatgccatctgtggctattcttttcttaaaaattaatatttattggccaggcacagtggctcacacctgtaatctcagcactttgggaggccgaggtgggtgggttgcctgagctcaggagttcaagaccagtctgggcaacatggtgaaaccccatctctactaaaatataaaaaattatctgggcatggcagcatgtgcctgtaatcccagctactcaggaggctgtgacaggagaatctcttgaacctgggaggtggaggttgcagtgagccaagcttgcgtcactgcactccaacctggatgacagagtgagacttcatctcaaaaaaaaaaaaattaacatataagtcaattatttaaatagtttttccctcatatatacaaacagcctgtgagcctctgaggcatatccaggggccacacagaggtcagggcaccctcagtgtgtcctcagtgccttcccccaagggtcccacttaaggaacctagagagcagcacacaggagccctgagggagtccactggttacagatggagggggagatgctggtgtgaacagagagctctgaaacggctgcagactgcaaggatcgaggcttacagatgatcacaccaaggttggccatccctttattgggaacagagactcaacacattcaaaatgtgatacttgaaaaaaaaaaagtttttgcaaagagcagcttaccaatttgtctcttgctgcttagaaacaacacagcaagtttataagtgtctgctagggatcttgggagccaaacagagtacttctacccaccgggccatggaagcagccttccatctgtatttgatgtatggctcgtggttaaatcaaatgctcacctatgctctactattccccaagccacacggaatgtaacattccagttttcaatatgtttgacaatgaaccatgctttttcttgcaggattaatttataataaacagatccaatctctttttaaatagaaatgtatctttacatgttacaagtatcattacatattctgctcaacttgattttaaaattgtgttaaagaatcatttatcggcggggcgcggtggctcatgcctgtaatcccagcacattgggaggctgaggcaggcggatcacgaggtcaggagatcaagaccatcctggctaacatggtgaaaccccgtctctactaaaaaatacaaaaaattaactgggcatggtggcaggtgcctgtagtcccagctacgcaggaggctgaggcaggagaatggcatgaaccagggaggcagagcttgcagtgagccaagatcgtgccactgcactccagcctgggcgacagagcgagactccatctcaaaaaaaaaaaaaatcatttatcaaataccaatcaaattggtctatttgtgtacctatctgaataaaataatggaggaagtatgtaatgcctattacaagacattacggtaagaatcagcttagttcatggtggcaagaaagtttttttttttgaaacttttttttttttttttgagatggggtttcattctgtcacccaggctggagtacagtgccatgatcttggctcattgcaacctccacctcccaggctcaacagatcctcccatctcagcctcccgagtaggtgggactacaggcacatgccacaagcccagctaactttctgtacttttggtacagacggtgtttctccatgttgcccaggctggtctcaaactcctgagctcaagtgatctgtccacctcagcctcccaaagtactgggattacaggtgtgagccactacgcccggccagcaagaaggttttggaaaccagaagtgcccccaaactgaattacgtttgtaattagtctcccttctcttggctactttctaagtttgtcagttgccactgaaagatagggtcagagtgggagtaaaaagcacagctacgcctacccttgtggtgtgtggccagtctcactgggccatatttctttgccactcctctcaggagccccagagcacagaaccctgaagaacctttgtctgcaaaggcccctggctaaggggtgagaggccgaggagctggggttgggggcatccagacttttagctgagacctttgtttctcaagtctgtcatctttgacactgttgacctacagatcacaaagcaccatgaggtggccaggagctatggaagggacttcatggctatggagctctgtcttcagcttatagagtgggcaggtgcccagagagctgagtaacgctgattaaaagcacgaggtgtgtttatccacaatacatctgctgattggttcatgccctaccccaatgaccatcaactcagggacccaaagcactgttccaaagggatgccagccacagttaactccacggaaagaactggctgagggtttttcagtcatgcctgaaggcctggagagaagagaaagcaagagtgcacccagatgccagcctcccctcaggagccctgcctgtcccctcctgagctacaaattaggcacagacacctggatcccccaccagacctccccaagacgtccatgcccacaggaagcgcataccagccaccatcgcccctgattcccaaatgagggccccagccatctctgtgtgatgtgcagtttcctccatctggccactccaggctcctgaggactccatgctcccatgcatggtactggagtgagaacatgtgctccaacaaaaccgcttctgagaggggctgggaggcagcagcaccagccacctgtcctacctgcaggacaggagcagccagcactcactgccctggatgtggggagtgagtttttggtgggccagggtgacatcctggttctgctctctgaggagaccccagttgtcattgtcccacagggccacatctgatgtgtgcacagagtgcaccctctggggctgagagcttcaccacccacttttggcatgagttcaggagcccagaaattgtgttagatgctgaacgctctctcagcctgagagttttttcagcagtacagtttccttaattctggtcagcactttttccagttttgtcttagtcaattcaggctgctgccacagaataccatagactgggtggcttataaacaatagaaatttatttctgatagttctggaagctgggaatacaagatccaggagccagcagatttggagtctggtaagggtgtcctcctcctggtctacacacagccactttttactgtgtcctcacgtggccaagagagagaaagaagagcgctctcgtgcctgttgttataaaggcactaatcccattctcaaggactccatcctcatgccttaatcacctcccaaagaccacacttctaatactcttacatggagactaagctttaacagtgaatgttggaggaacacaaatattcagtcaatagcaagcttagtctatagaccaatgaccaatccaaatatcttatctacatataaactttaggccagagaatgtatgtctgccaccattggccctgatgccccagcctaggggcccgatcctcaggggctggccttggcctcacgtacaggctatcattacttccctcctccctctctgctttgagtttaatttgctaccccttttctagtttcttaaggcagaaattttgattactaatttgagactgttttctcatctaatatgagcattttaatgctataacttttcccctaagtactgctgtaactacaccatacaaattttgatgtgctatatttgcattttcattccgttcaaactattcgttaatttcccatgagacttcctctgacttatggattatttagaaacaggctgtttgagtttcaagttttgggggattgttcaaatattcgttactggtttatagtttcagttatgacatgagcacaaacatcatgatttctgttctttttaatgcactcagactggctaagaatatgttctgtgttggtgaatattccatatgtatttgaaaataatatatactctgctcttgttaggttctagaaatgtcaattacctcaaattctctgagagtgcagctcagttcttctatatccttactggtttctgcctacttgctctgtcagttactgagcaaaaagtagcaaagtctgcagctgtaatacatttgtttatttctctcatttttgttagtatttgcttcatgtactttgaagctatgttgttagcatgcatacacataggatgattatggcttcttggaaaattgacccctttagcattatgtaatgttcctctttttctttggtaacagtccatgttgtggagcctactttgacataaatatggctactctagctctctttccattagtgaatatcttttaacctccatatgtctttatatttaaaatgggattctttttcttttttttttttcctacaacctcaacctctcaggttcaagcaattctcctgcctcagcctcccgagtagctaggattacaggcacacactatcatgcccagctaatttttgtatttttagtagagacagggtttcatcatgttggccaggctggtctcgaacccctgacctcaagtgatccacccatctcagcctcccaaagtgctgggcatgagccacagtgcctggcccttacaatgagattcttgtagacagcatatatgtgggttttgctttttcatccagtctgacaattttatcttttaaaagatacgttttgaccattttcatttaatagtattaatgatatgtttggattaaaatccaccatcttgctacctgttttctatgtactgtatgagttcttttttccttttgtttctcttttgctatcttatcttgggtaaattgagctttttaatggttccgttttatttccactatggacctgttatacccctatttttaattgttagtggtttccctagggtttgcaataaacatctttaattaatgagatttgtttttttttttttttttgagacagagtctcactctgtcactcaggctggagtgcagtggcatgatcttgcaggctctcactgcagcctccgcctcctgggttcaagcgattctcctgcctctgcctccagagtagctggattacaggcacacagcaccatgcccagctaatttttgtatttttagtagagatggggtttcaccatgttggccaggctgatcttgaactcctgacctcaagtgatccaaccaccttggcctcccaaagtgttggaattacaggtgtgagccaccacacctggtctaattaatgagattctattttaagtaatattacttgacttcacatgttgtataaggatattacaacagtgtattaccaatccctccctcccattctttgctattatcagacattttatttttacatctgttataaattcataatgcactgctgccctttgctttagacagttatctgttagagcaattaaaaagaagaaaaaaatgaattttcacatccatttattccatttccatcactcttaattgtgtaaatacaagtttctactggtaccatatttcttgcactttaacatctcctgtagttcaggtctgctggcaatgatttgctcacttttatttgaaaaactctttatgtcttcttcatgtttcagagatattttggctgggtatagaattctagattaacagtttttttttttctttcagcactttaaaaatgtcactccattatcttctggcttacctgttttaccatgaaaagtctgttgtaatttgtacctttgtttttctctgtataatgtatcctcttttttctctggctgccttcaagactttctttttgtctttgggtttcagaagtgttaagaggctattataggaatatttgtggtggtgttactttttcttcttgatgttctcttagtttcttagatctgtgttgatggttgtcattaattttgaaaaattcttagccattatttctttaaaattttattttgcattgttctttccctcttctgggatttcatttacacagaacttaaggtgctgatattgtcacacagctcttagatgctgtgttcagtttcccacctcctttttttctgtttcagtttgtgtcatttctagtaacctatcttgaggtttacagatcagattctttgctcagctatatcaagtcaactgaccagcccctcaaaatcattcttcacctctattatggtgtttttcatttctagcattttcatttctttctcatagatttgttctgtatgctgaaattaaccatcaaatcttgcatggtatctggcttttctattagtccttaacttattaatcagttatttttaattccttgtctgatagtttcaacacctgtgtcatatctgagtcttgttctataaactgctttgtcttttatcaatgtgttgggtttttttttttatctttcctttcgcctcataggttttttgttgtcgttgctgaaagccaggcatcttgagtaggacagtaaagactgcagtaaatcacttttattcctggaaagaagcatgcctttccttttgctaggttttcagagtctaggtttggaccagtctagttatgatagcccaggaaggtcacccccatccccagatccagggatacagtgcctgcctaagacagatgcttaatcagagtaacagaagatgacccttagtgcacccagtgtttgttgccctacactctgcagtttaagcttttattccttggtagaggtaggatggaaatatctatggagacactctcttagaactcctgccagtcttttttgggagaaccaggtaggtcctgtggagaggagcctgcaggtgcatgtgaatttcctttatatcttcagcccccagggttccatattatttcactagctgatactgttcctttaccaatttaaccattttagctgaatgattcttactggggtccagctgaattggcccttcttaagctcatgtctgtctctccttggaggcacctgtctttccttagatattggataagtcggtttccctgtgacttcagctgtctggtgggttaaagataagttgtgaatttgcagtttgactggaatgttttcatggtggaacaatgctcttccagcttttcacatcggagacaaaaaccagaaatcttgatttttttttagaaaataagtactcagaatatattcaggctagcatgagatgatgcctatatgtttccaggctaaaagacatacaagaggcctttcaaaaacaaaaacaaaacacctttccggcctttttaggctcattttgaaaagcagttgctgttctagacatttaccaccagagggcaagccgctgcatggctgctcctcactggtaaagccaggtttccaatagggaaatgtcagggtgtacagttgagaagcagaggcatcctgagcagccgctgctcacgaggaggacctgttttcatggcctcctggccggaactgtccctgggctctgcagccccagccctcaccacaggccgcagttgaccctctgcagaaaagccttcctttgagcccctcggtgtcttcagttgtgagcaggcatgtccgtagagcctctcagtacctggcccttcaccccagccagatctaggccgcaaggctgctggacccttctaggtggacaggcactagccccttcaggggtattcccaccgtgcactggagccctgggcagcccaaggagtccattccagccctgctgttgaggggaggagtccccaggaaccccatgatagggaagtgagggtgactgtctggggtgccgtcttagcttaggtggtttatctgaaacaaacaaaccaaaatcacagtgacttaacacagtggaaatctaaaaggagtgttctcaattgtcaggcagctcttcagtggagatctgctgtcttctgcaggcaccatggaaggggagtggggagagacacccccatgcctgagcacatcacccagcacttcccacattgcttctgcccacagaccatggatgccactaggtgcctgttccccctaaatcctggggccggggtggctaagacatggagtggtggctgggctgatgttctccaacagcaattctaccctgggaagcgggtggacagccagacccaaaatgtccaagttgcacccacaggaactgcttctaacagattattcttgttctagaacaatatttcctgaatttgcttgattttaaaagccacaggagatgcttatttaaaatgttgctttttgagtccctttcctggacactttggtttggcccatccattcatgggggcttggaactcccaggagctgcactgctctattctgggaaacattgtggatggggagagcctgtgccaccccctgccccatgagtaagaagcgaggctaaccccttctctgtttgtgtagtgactcatagaactatgggacaggctgctgggcaccacccaagggagacctgtccctgagccagccctgcagccctccctgggtgtgtctgccctgcagctcagatctggaaagggtggccacgtcaaggcagaacccagcaggctgcagcaaagccaggccaagccacccctgacctctcaaatcagagcactgcactttccaatcccaagccagattaatgaaaagcccggagctggtcattggtcagcaaagctgcatttcccttattggcagcttggggaagctggagaagaagaggtgcgggggtggagaggggaattatttgcacccacttttcctcttaagcaacactggagggcagcattgagtcagtttttccaatttcttaccaaatcaactattggtgttcagtcttcgatttgatctatttccttgcctttttgttcttgccatggcacccttgccatgaaccatgggcaccagcaaagaggcaaagcagctggtccaaggtggctgtgcttctctgctgtgtgtgactcccaggtgtggggcctgcaggggagctaagtggagcccatggaggaggctgctgcttgttgcgaggaaagacttggggagaccatctcccagttcctcctgcccttgtccctgacaatgcccttgggaggagtcaaccgtgtcactaggcactcctctcatcaggtcccccagcagctcagaagctcctagaagatcccaaacctgtagataccccctccaccctagcccttctggagtgagccaggatttcccacgggtggtgagtttcaccacagaagttttgtgatgagtcaatccctctgagaaatgaccagccagtggctcatcactgcaatctccacctacatgtgacctcctcaaaaggaccccctgaccccatccgaaaaaggcttcaccatcactgccttctgcctggtgtttacccttccagggctcatcaccacctgacattatgagatgtttgttaacctgcttatctgtccccagcacaggtgagcttcccacgggcaggggcgggtgggtccatgggtcccaggcactgatacagacttgtggcacaaaattacaaaccagtagaggtcagcaacacccttgctcacctgacttgcacattcggcccttctctgggacgagacaggagagctgagccccaggcccacctgcaaggtggcctcccaaagtgtgcctaacctgcctagatccttcctagaaatagcagaggcagcaatagcttttttcccattctgctgcccaatggagtatctgccattggacagacccaaagagagccagggtccaggtgacgcttccaactgctctccactgtccgcaataaatacgaaattttaaaaactagcaatagtggttttggtcttcatgctcctgctggcacagatctgtgtagatgtccactcggtgcatttgtcacccagatacctggcttgggaatttccttgccatcctgcctggggactgccggggctccaagcacggctctgtctcttctgttccagccgtgatccccctgacggattctgagcacaagctgctgcctctgcactttgcagtggaccctggcaaggactgggagtgggggaaagacgacaacgataacgcccggctggcccagtaagatcctactctgtccctttccccagcgcccacagggagggctatggctggggcatcctggggagggaatgtaccacccctgctcctcctgggacagctggcatgcaagtggactgggtgctataagggccagctcagaccatttcaataggatattcttctcttgccagccttatcctgtcgctagaagccaagctgaaccttctgcacagctacatgaacgtgacgtggatccggatcccctccgagacacgggtgagcctggctgtgctgggaccagacctggcagcagggtccaggctgctcagctccagtctgaccagggtgcatcctcccaaatgctcccacactcttgcctgcccctgcccggccgcccaccccagccatacccacagcccagtagctcctccacctcctttgacctagccatcccagctgcatgcagctggggccaccctggctatggcttgaagtggctctggctggacctagtggctgtgtacacacatgtaggcatgtgtgcatgcaagcatgcgctcttgtaaagggattttttgtccccctattttctgcagaaggaatcaacacgcccactcagaaaacaagccacaggcaagtcacaacacaaaactatctgctaagatcagaacacaatgtgctgccgcagagcggaattaattacaaaccgtgtgggtcctcaaaaaaagccagggaactgagagcgcgattcctcggcgcccccttcctcccctcccagaggcagcacactggtgggtggagctggcaggaaggtgaggagaggggcctacgccccatgaggctgcctgcctccagagggtccggggctgcccctgcttgcaaacgctgagggattcattttaagcatctgactgattgatgttttttgaaatctcagtagtgaactgccagggaaaaggatttgtaaaaaacagcctgcaagtaattggtcctctccagacatttacttaaagtggggctcacaaagaattagtaaaggagtggcatgagtcaaggagtcgggcggtggccagcactgctcagtgctctcagactccagcctctgcctgtacgtcatctcccagggctccatgaggcagggactgataccccattttactgatggcataagtgacagccagtcggtggcagtttgagtcctgcgtctcaaaggcctggagcactcccgtagtgctgtggctgttcttcttcagcacccacatggggagtgatggcagtggctcgagatgtagaatcaggaggctctcgggctgagaatagctctgcctgcaattgccaggcctcggtgccttcatgttagatgcagggctctcagcagacaactgtgggaagggtccttccagccagggactcctgagcccgctctcagtgcgctcctgctagcaccaggcgcacctcccttcctggcccagcccgagtgtccaccctttagtgtctcacgcaccagtctgagacacttcacaccttcctatcccaggtgggaaggggaaaggaatgtcagagtgggaggtggtgagggtcagttctgcccacctttgctttggggtgacctggtcacaggagagtcaccgactcttgaacttgcttgaagggtttgagggggggacaaaaattaagtgggagagcaatgggccttctcccaggctcatcccctggaagccagggacgcctgttcaggtatgagcaccagttcctgcagcacccagcggccagcatgatgggccctgcctctcgtccaatgacactcggtcagaattctctcctcacccagggaggtccctacagagtagtagtaggtgctgcctgcctctctgctctcccacctcttttctcagggtccccccaccccagatatggtcgtgcccccctcagactggttgacctcatcagtgggtctcatccaagaagtgctccccagcgtcaccccaccccacccagggggacttttctgggaatgggaacatcttttttgctgagcgcaggcctatttcagaatcctcctcaatttagcattccaccttgccaaactgagtgagaaaggaactcctgaagcgatttggcatccctgaatcaagggggtgtttgatccaagatccgatgaatgaggttgagtgcaaggtttctgtcccatgcctggcgtgaggtgagacatcttttcagaggaggcacttttgtgcaggcccagtgtcctccccacctgaaggcctccatccttacagaggccagcctgggacctgtgtctggtcaagcaggcggccttgccagtgggggaaggccagagtctgaacctgaccgttctaaattgtgacaaggctctggggaccaagaccaagtagggtatctgcaccctgctgcaataccctactcagggttccagggtaccaagtacctgaggtcccccagagagaaagaatgagtacaccccagcttccctggccagaagacacacgcagttaagaggtccctacatccttttactaccgcagcagatcagagcccactcctatccgctccttcagcaccgcccatccggatgtcacagtcaccagagcgacagtggggactgggacagtgaaggtccagggccctagcctcggcaacacaggggcaaggtgtgtcttcctcgctggcgcgtggacagctcttctctaaccaccttcgatccggccctccctctccacacaggcgcccctggcacagccggagtctcccacggcctcggcaggggaggacgtgcagtccctggccgactcgctggactcggaccgcgattcggtgtgcagcaattctaacagcaataacggcaagaacggcaaggacaaggagaaggagaagcagcgcaaggagaaggacaagacgcgcgccgactccgtggccaacaagctgggcagcttcagcaagacgctgggcatcaagctgaagaaaaacatgggcggcctcggcggcctggtgcacggcaagatgggccgcgccaactccgccaatggcaagaacggggactcggccgagcggggcaaggagaagaaggccaagtcgcgcaagggcagcaaggaggagtctggtgcgtcggccagcacgtcgccgtcggaaaagaccacgccgtcgcccacagacaaggcagcgggcgcgtcgccggcggagaagggcggtgggccgcggggcgacgcctggaagtacagcacggatgtgaagctgagcctcaacatcctgcgcgccgccatgcagggggagcgcaagttcatcttcgccggcctgctgctcaccagccaccggcaccagttccacgaggagatgatcggctactacctgacgagcgcgcaggagcgcttcagcgccgagcaggagcagcggcgccgcgacgccgctactgcggccgccgctgccgccgccgccgccgccgccacggccaagcggccgccgcgcagaccggagacggagggcgtgccggtcccggagcgcgcctctccgggcccacccacgcagctggtgctcaagctcaaggagcggccgagccccgggcccgcggcagggcgtgcggcgcgggcggcggcgggcggcacggcctccccggggggaggcgcgcggcgtgcgagcgccagcggaccagtgcctggccgcagccccccggcgccagcgcgccagagcgtcatccacgtgcaggcgtcgggcgcgcgggacgaggcgtgcgcgccggccgtgggggcgctgcggccgtgcgccacgtacccgcagcagaaccgctcgctgtcgtcgcagagctacagcccggcgcgcgccgccgccctgcgcaccgtcaacacggtcgagtcgctggcgcgcgcggtgcccggggccctaccgggcgcggcggggacggcgggggcggccgagcacaagtcgcagacctacaccaacggcttcggcgccctgcgcgacggcctggagttcgccgacgccgacgcgccgaccgcgcgctcgaacggtgagtgcggccgtggcggcccggggccggtgcagcggcgctgccagcgcgagaactgtgcgttctacgggcgcgccgagaccgagcactactgctcctactgctaccgcgaggagctgcggcggcggcgcgaggcgcgcggggcccggccctgagcggcgcggcgcggcgcgggcggcgaggttctaccttcgaggatttcttttccattgtgtcggtgtcttttttacatgccctggtccaccggaaggccggcgcctcctctgtcagtgccgtgtacgtgtttggtcaaacgttcctaatggtgcctgaacctacactga

SEQ ID NO: 52 - DNA, 138524 bp, Homo sapiens
ggccgcaggcgcaggcccgggcgacagccgagacgtggagcgcgccggctcgctgcagctccgggactcaacatgcgctgctcgccgggaggcgtctggctggcgctggccgcgtcgctcctgcacggtaaagccactgcctccccgccctccactcctccgtgggatcccgggcacatcccgggcgcctctgtgcgccccgcgcctgggccaggtttgggatctccccgccgccggggaggggcagcgggggcgctgcgggggctgcttgtctgggctgcaccgggtgggcggcgggggacgccggcaggagggagtcgggggtacccccgccggcctgccctgagccccctgcccgggtcttctctccttaagtgtccctgcaaggcgagttccagaggaagctttacaaggagctggtcaagaactacaatcccttggagaggcccgtggccaatgactcgcaaccactcaccgtctacttctccctgagcctcctgcagatcatggacgtggtgagtcccgcctggctacagggctgccctctccccttcctgggctccgaggggctttttagacagcgtcgggcggccaggcggtggagctcggctggggcactctagttggccccaagctaggcagggccatgctctgagtctgtccccagcctgccctctcctgagtgtctcatttctcggtttcccctccagccaaggagggacctggtaaagcttattccatcaccctggccacctgtgcatggttacttgggtcccacctttctctcaggttagaaactcaagcatcctgagctgggactcagtagcaagaacaggtgaagttcactttttaatctcccttatggtgtaagtgttgacttgcattccagcattgtcaatttagccacttctagacttttctgccgcctatggtatgtaacttctttggtgggggcctggccctgagctttgcagctggcgaatctatccaggcagagggcaagagggccagctgtgaactttcactgtgaccccatcttaggaatgggcatgctttgccttcctggtgaggacaggtactgggagtcctgctccgaggactcagggttccccgtcaggaatacatgtgtctgtccctccaggcagctgccatcagttccgtgggtctcttgccttgcagccttgctagtgcccacttcagttagccaatctgtgtaaacttgcctattgttcctctatgctgctttggatattcaatattcatggtatattctccatacaatacaaatacttcacacaagtgtttaattcattataagtgggtttggtgtcttgtctatacggagtatcggattctattgtggagcaccctggagtgtggcagggtggggcacagggataataatgttcattgggagggagagcatgatgggaaagaggtgagagaatagccacaattactggttaaaaaagaaatagtgctaagagctacctggcaaagtggaaaaaggtaagaggtgatatttcataatcctacaaataaacagttacccgcactatcatgttgatgaatggtatatcacttaacctagttaaaattgccatcatacattgcctcctttccaacgctacactcgcctcaaatgtgttcttcctcctacagacagaatcatgctttaaaatattgaatgtatatgtgatgatgtggaaaagttatcatgagaagagctgtaggggaaggcaggttcagtctcatgtgttgcagagcagcaaaagttgctgtttatggagcagttcctcagttgctttaaagagctcaggatttgtacttgggatcttcggtgggttctgtctgtgttggtttctggatggctgctgttaggtaagtttcttaagcatcttgagccttggctttccggctaataaaatgcacactgtcagtcattgtgatcaactaaagaatatggaaacaacttgaagagaccttaaagctagatatgtgattatggtcattttcatgcagaaaccacatgaaaaaggaccaggcagcagagctaacacaccccgcaagtggtgtgtgacagggtgagaaagggacagtagccccctcttcccccatttgtccagggtcaactccagccaggctgtcacactgtttgtgtctgctccacagctgtctctcttggagtgggtgaccctgtattgcctggatgggggtgatggtgtagtagcccctcagtagaggaacaggaggaagtcagtagaacaggctcctgaggttgcaaaggctgcggcagcaccttttggagaagagaccactcgcggagaagctgcaggctttcttctgggaacttcttctttaagagactcttaagaaaccaagttattatgaggagctctgagtcttaggagaagtttaggcataagttagtgttatactacatgaacatttaaaataacttttgtcatgttagaaaattacaaaaatagcacattggcactttgtgtcaatgacattccagtgtccttaggaaatgcatgtgaagaaggctgtcagcagccagaggtcatgggaagggggcgggagaaagtttatctctcaccttagccgtggtattggctgtgaacacattgaacttcccagccaggcaatgctatgttcatggagtggccttgaacaaactcacttacctttctaagctctgttttctcatgtgttaaatgagaataataatacctgcttcagagggttttgagaggattaaatgagagaaagtgcttgcccacactggtgattcactgaaggtctgctccatcttaattatgtaactactcaactcagaggtcaagaagtccatgcctagaagggtgtggtcacatgcccaaggtcactctgtgattagaggtagggctatgaggaaaaccaacatcggacaagtcctttgtctttcatctgctgcttcctttagacttggtaacttcggcagaacaaagtcatttaatttatttaaactgggtgaattgtaactaatttaatgtgactttcctgagatcctggatgaagccgaagtctctatcagacataacaaaatatgcaaacatttgtattccagccttacttggctctgcctggtttttgaagcagagccaggtctctccagctgaaatctcagcgctctggacagagacacaatggttctcataaaggcttcgtgtggcaaaatcttggctggtatagattctctttacacatttgttgcccattttaactggactgttctagagaccatagtagttggttttcctactcccaaatattgttattgattgcttttgtttgtcagcagagattcctgactggagtgataggaagacaccatatgatgttacatatttgatttttgtgaaagatcatttactctttaatcaatttattccacacatgctattgagctcctgttgtagactttgacaaattctgagaattaacagaaagatgagggattatttttcctttcagagatctcatgagctggctagggagattaaaaagtaaatccaaaattacatgtgatgaaatttaacataaatatctatacaaagtgctagaaaacattgtgttcaactagagcagctgagagtggcttcaaagagatggtggttagagttctaaagatgagaaggagtttgccactgaaagtaggaaatcttttccaggttgaggaaagactgaaagtgcagtggaggacagctcactttcaacaaggtgtgttttatgggacactggcaacctgttgatctttactacaggttttgctgcaagacttctcagaaaatttatgctatgttttttgagacattctaaaagaccaatatagtactgaccaaactactgatagttttatagacccttttgtaagaattatatgctctagaagcacaccttacaagggggaggctatgatttttctttggtaggaggtgctagatgagtgtggggacagtaaggttgcagtgtgtgaggcgtcctgagttcctctgcaagtttgcatttcacctggccctagtctaggcatctctgagggcatgaggaggcagtgtgccaggggttttgtgaagctgtaagaccagcctgccatagcatattttcctagaaaaggaaatagtccaaaccatgatatttgtattaaattcaagtataaattatagattggagtgaaaaaactttgcatacattttagaggtacaacatgagtcctcaaaggaattgcttgacctgctgttattcaacaggctccttcatgaagcactaggcagagggggaagatatggtgggtcgttaaacaggggagggaagtaaccgaatctctgcttaagcagaagatgctgagagcagtgagtgtgagacgggtcagagaggagagaaaggtaacggacaaggaggttgaaactaggatggccactgtgggaatgtggagaagggggcagatttaagagatgttttggatatattgtctatgatctataactgtgtgtataaacatcatgaatatacatcaataaatttgctaagtgaaagtgcctaaattattcttatatgcacacactgacttctggtgattattaatttacttcctgggcttgtaactgggctgggaatgagataatacataagaaatcattttgaagtgatgcatgtgtgaggttctaatctgccaagtttccataatgtttctttctcctttatttgtgctgtttagtcagtcacctgagcacatgcatctgaaggccattctaagtgatttgcataaaataaatatgcattggttatgaagcatgtccagaagtcaagtttgttaataatatgaaccaacatgtaattatatacaaatgtaaaacacataattatacaagattgactattttggtattttattgatttgaaatgcagactcagctttttggaagctttagtcacaagaccgtagaactaagtggtcatgcacttacgttttggcactgaagatggcaggcagggctgtggagcccagtatcctaagggcttatgtgttatctgaattcctttggggggccctctgtgtaggtttgcaatatgtatgattttacattcattagccactatttaaaatgctacaactccaacaaaatactgtcaaatattataaaacccacatacctagaatatattgtaaaaagaaatgctgaaggtataatcaggtattgatctttatcatttaaaaaaatctttacttttttgagcagttttagcttcacagcaaaatgaagaagaaggtacagagatttcccacagcttcctcaattatcaacattccccactagagtagtatatttgttacgactgatgaacttacattgacacatcatcatcaccccaaatgcatagtttataagaaggttccctcttggttttgtataatctatgggtttgggcaaatgtataatggcataatgtgtaataccctcattatggtatcatacagagtatttttactctcctgaaatttctttgtgctctccctgcttatcactaccttcaccacagctcttggcagccgctgaccttttgttgtctccatagttgaaccctttccacaatgtcgtatggttggaatcatacagtctgtagccttttcagatggacttatttcacttagtaatatgcatttatgctctctccatactctttcatggcttgatagctcactcctttttagcactgaataatatgccagtggtctggatgtagcacagttcatttatccattcacctccggaagaacatcttggttgcctccaagttttggcaattatgagtaaagctgctgtaagcatcttgtgcagatttttacgtgaacataaggtttcaatcacttgtgtaaataccaacgagggcacttgctggttcgtatgctaagagtatgtttaattttctaaggaaatcacagactatctcccaaagtggatgtaccattttacattctcaccagcaatgaatgagagcccctgttgccctttatccatgtcagcatttggtgttgtcagtgttctaagttttaagcattccaataggtgtgtagtggaatctcattgttttatatttgcatttccctgatgacatatgatgtggagcattttttcagaagcttattgccatctgtaggtcttctttggtaaggtgtctgttaaggtctttggccaagttttcagtgggtttttttttttttttcttatttctgaatttaagagtttttgtatatttttgatgacagtcctttatcaggtatgtcttttgcaaatatttttcccagtcagtaccttgttttctcattctctttacattgtatttcacagaacatacatttttaactttagtgaaacccatcttttcaattctttcttttatggattgtgcctctggtattgtatctaaaaagttactgcaatatccaaggtcatacaggttttcctctattatcttctaggagttttatagttttgcactttacatttaggtctgtggtccactttgagttaatttttatgaagggtgtaaggtccgtgtctacatttatctttttgcatgtgattgtccagttgttgtagcaccatttgttgaaaagatgatctttgctccattttattgcctttgcatctttgtcaaagatcagctgattatattcatgtgagtcttatttctgggttctctgttgtgttttgtcgatctctttgtctattctttcatcaataacacagtcttgattactatagctttatcctaagtcttgaagtttggtagtatcagtcctccaactttgtcgttcctcaacattgtgttggctattctgggtcttttgcgtctctctataaactttataattgctttatcgatacccacaaaataaccttctgggatttgattgaatctgtagatcaagttgggaagaactgacatattgacaatactgaatttttctattcatgaacatagaacagctctttagttagttcttcctttattttgtttgtaagaattttgtagttttactcatatagatcttgtaaatactttacttgatttttacctaagtgcttaatttttgaggggttaaatggtattatgatttcaatgtcaaattctacttgttaattgccgaaatataggaaagcgatttacttttacatgttaaccttgtcttctgcaaagttgctgtaattgtttattagctcctggagattttttttttggtcagttattttgggttttctacatgaacgatcatgtcatctgcgatcaaagacagctttatttcttttttcccagtctatatactttttatttcctttttcttgtccttttgtattagctagtacttccagtgtgctattgaaaggagtgggagaggggacaaccttgacttgttcctaatcttagtgggaaagcttcagttttcttatcattaggtatgatgttagctataggttttttggatatgtatatatatatatataaatatacatatgtacatacattttgtgtatatgtaaaatatgtgtacatgtttacatttatgtataaatatgtacatacattttgtatatttatttacatttatataaacatattttgtatatataatatacatattttatatatacatatgaaaaatatgtatatacacacatatacaaaaaacctacagctaacatcatacttaatgatatatatatttatcaagttgaggaagttctcccctattccgtttactgaaagtttttgtgatgaataggagttggattatgtcaaaattgttttcatctattgatataatcatatgatttttcttttgtagcctgttgatgtaatggattatattaattttttaatgttgagccagccttgaatatctggaatgaatctcacttgaccatggtgtataattctttttgtacattgttgagataaatttgctaatttttaaatttttggttgagacggggtttcactatgttgctcaggctggtcttggactcctgagctcagttgatctgcctgtctcagcctcctaaagtgctaggattggaggcgtgagccaccacaacgtgctaatattttgttgagcatttttgaatctgtgttcatcagtgatactggtttgtggttatcttttcttagaatgtctttatctgccatttgtattagggtaatgcaggcctcatagaatgttttaggaagtatttcctctgcttgtgtactctgaaagagactgtagataattggtataatttcttttttaaatttgtagacttcaccagtgagcccttctgggcctgttgctttctgttttggaaggttattattatttgattcaattgctctgatagatataggcccattcaaattgtttatttcttcttgtttgagttttgagaaattttgtctttcaaggagtagtccattttatctaggttataaaatttgtgagcatagaattgttcatagtatttatttgttatccttttaatgcccatgggctgtgtaatgatgtcttctacttctgatattagttatttttgtcctttctcatttttttcttatttagcctggctagatgcttattgattttattgatcatttttcaaaaaacagattttgtttttgttcatttcctctattgatttcctgtttacaattttgttgatttctactctaatttttagtatttctctgcttattttggacttaatttgctcttttttctagtttcctaaagtagaagcttagaatactgatttttagatctttcatttctgtacatttcaatactgtattcagggctatagattttcgcttaaggacttcttttgctgcatcccacaaattttgataagttgtgttttcattttcatttcagttaaaatatttcaatgtctcttgagaattcttctttgaggcatatattatttaaaggcatattgtctaatctccacgtatttttggatttttcagtaatctttctgttactgatttctagtataatttctttgtattctgatagcaggcaatgtgtaatttctattcttttaaatttgttaaggctctttctgtggcacaattatggggaatattccatgtgaacttgagaagaatgtgtattctgctgttgttggataaaatagtctatagatgttgcttatatccaattgatggacaatgttttgagttcaatcatgtttatactggttttctgcttgctggttcttcaaatttctggtagaggggtgttaaagtttccaactgtgaaaatggatttacctatttatccttgtaggtctaatagtttttgcctcattagtttgatgctgtgtttttgggcatatacacattaaggactgttatgtctttttgtagaactggtctttttatcattaagtaatatccttttttatccctggaaactttccttgctttgaagtacgctctatctgaaatttacatagctattcctgctttcttggattagtgttagcatggtatatttttctccatccataagacactgttaatttatatgtgtctttatatttagagtgggttttttgtaggcacatacagttgggtcttgttttttgttctactcttacagtctctttaaattgatgcatttagaccactcagagtgattgtcgatatagttggatcaataactatcatatttgttactgatttttttgttgtccttgttccttatttcagtttttgttttccactctgacttttatggtttagttggacattttatatggttatgttttccctcctttcttggtgtatcagttatagttctttttttacttttttagtggttgccctagagtttgcaatatacatttacaactaacccaagtcacctttcatgttacattataccacttcatgcataatgagagcactttataatgcaaaataacatgaatttcttcctcctgtcccttgtaccatttatttcttataaggtgcgtgtgtgtgtgtgtatatgtgtgtatgtgtgtgtgtgtatatgtattatatatgtatatattatatatacacaaagtataataaaatacatttttgctattgttactttgaacaaactgttatctgttagataaattaataagaaaaacaaaagtttttattttgccttcactttttccttcttcagtggttctttctttaatttagatatgactttcaacctgtatcgtttccctttttttaaagaacttcttttaacattttttcaaggcaggtctgcttgaaacaaatttcttcaatttttgcctgagaatgtattttttttccttatcttttgaaggatgatttcaataattctagatttgtgactttctctctcaacactaattattttactctactctttttgcttgcatgatttcatgtaagtcagatgtaattcttacctttttggtcctctaaagggaagggttttttgtctgcctttggcttccttcaggattttatctttatctttgtttatagtttgaaatgatatacttagatgttggattttttttcccccacatgtatcagcttgctgttttctgagattcctggatgtgtggtttggtgtttgacactaatttggggaaattctcaatcattgtttcaaatacttctgttcctttctctacttcaacagtccccaacctttttgacaccagggacctgttttgtggaagacaatttttccatagactgtcgggggccatggttttgggatgaaactgttccacctcagattgtcaggcattcattagattctcataaggagcgtgcaacctagatcccttgcatgtgaaattcacaatagggtttgtgttcctgtaagaatgtcacgctgccgctgatctgaccggaggcggagctcaggcagtaatgctccctgacctgcccctcacctcctggtgtgtggcccagttcctaacagtccaggtgacaggtactggcctgtggcctgggggttggggaaccctgctctacttcttctccttctcgcattcccatcacacatatgttacaccatttgtaattgtcccacaatccttggatattctattctgttgttttcagtctttgttctctttgcttttcagttttcaaaatttcgattgatattcctcatactagggattctttcctcagctgtatccaacctactagtaagcctatcaaatatattctttatttttgttacattatttttgattgctggaatttctttttggttatgtcttaggagttccatctctgtgcttacattgtttaactgttcttgcatgatgtctgctttttccattagagcctttagcttattaatcatagttgttgtaaattctgatctgataattccaatactgctgctatgtctggtactaatgcatgttctgtctcttcaaattgtgttttttgtttgttttttgccttttagtatgctttgtaattttttcttgattggtggctgtgatgtaccaggtaaaaggaactgctgtaaattaataagttactaatgtagtgttaaggtgtggagggaggggaagcattctatactcctatgattaggtctcagttttttagtgagcctttccctctggacacgaacttcataggtgtttctcagtttgtttctccccacttgagtgcgataggatggctagagtgggtggagttcagtatttcccttcccttgtgtcaggtaagctctcataataccccggagggttagactctggttaattcatttctcctgatggcaggccttattaaaaacaacagaaaattctggcacatttccaagtggtttctttcacttccctctggtggaaggatgagggaacatttcttcagtatttcctgtgggaacctggtagagcttctggaggtaaatctcatgatatttgggaaccccctatgattgaatccttttggaatttttaactttcaaagttgtacacactgagcctccaggaatttgccaattccagtttcaggttttcttactctgctgctggttcctgtggtggttttgctgattagtctctgctctggaaagtcctggctctctgtatgtccctgtttgtccccctaatcttgagagcagaagttcatcctgtgtgttcccctcttagttgggctccaagaagagctgttgtttttctagtgtgttcacctttttacttgttaggacaaagttcattctgagcttcttgcatcaggaaccaggaactggatctaataatgtttttataagatacatttcttaaaatgacaaaagtaatatgtgtttgtacaggagctaaattaaacaaaccaaaaaaagaatcaagaagttgaaaatcaagggggtaaaaatcagcacacacaaggcattctggcagagttcatgctatcttttctttatgtttatagatgtgtagagaaatatttaaatatttaaaagttaaaaggtataaacatgatgtatggtgccttaagcagtattaacaggcattgattttaaagtggtacacttaggcccattagtaaacaaatacagattttaaaatacatttatatgttttcttcattaactcttaccatcactgcatattcaatctatattccttttgtaatttaaaaaccattttaaaaatgtgtttaaatgatttatgatgatacttataagtaacacatagttgggtttttaaaaaaattgaatttgataatctttgtattttagttatccttcatgtggttactgatctatttggttttaaatctatccttcactgtttacttccacttacccttgtctcttctatgttctttttttcctcttttttcttacacttttctggattaattgctcattttatattattctaattttctcttctattagtttgttagtcatatttctttctttttgtcttacagtggttgatctggagattacaataggaatccatgactaagtaaagtctagtgaaagtcgtcaacctttctgtacaatgtgaggactttacaacactttaattccataattccaatttatctactgttattgtcatatattttatttctataaatatatttaaaccttataagattataattgtcttttacagtcagtattcttttagatttactcgtatatttaccttttttgttactttaattcctccctgtatcttctaactttcatctgagataattttccttctgccctttagacttctctttcttgagagtctggaagtagcacaatttctccatgtttgtttcaaaacttatttatattgcctaatttttgtgtgataattcagaaatacagactttgtgttgccggttagttacagcacttttatatacagcatagtgtctatagtcgattaccctagtgttttctgacttcagtacttctcttaagaggtcagctgtatgccttactgttgcttctctgttcttgttttctttggtcacttttaaattttattctttgtctttgatttttaacagttttgctatgataagaatatgtttctgctcttttgttttacctgcttgggattcagaatgacttattgaatctgttccttggtttcattcacaagttttggacaattgttgccagatcgatcgatcttttcctccttccttccttccttccttccttccttccttctttttttggggatggagtctcgctgtgttgcccaggttggagtgcaatggcacgatcttggctcactacaacctctgccacctggattcaagcaattcttctgcctcagcctcccgagtagctggaactacaggtgtgcaccaccacgcctggctaatttttgtatttttagtagagacaggttttcaccatattggccaggctggtctccaactcctgacctcatgatccgcctgcctcagcctcccaaagtgctgggattacaggcgtgagccactgtgcccggcctagatatttctttagatatggcttctgctctattttttctgccttccctttttgggacaatgattacatgttcaccacagctttcactttatctcagtgattctcaaccaggggcagtgtctctccccagggaatatttggcattatcttgaaaaaatttcagttgccccaactggggagaaagatgctactgacacttacagggaagaggctagggatgctactaaatgacctatagtgcatagggtgactcctcaagaaaaagaattatctggcccccaatttcaacagtgctgagatggagaagactaatttattccatatgcctcctattctttgcggcaattcccattactttgtctctccatgcttcatccggtccgttttctgttgacatatattcaatattcagtccttgaattctctcattgtgtctatctgttgttagtcccatttattgactcctttttaaagtttcagatattgcatgctttagtgttaagagtttccttttggttcttacgatgttttctagctctcaagcttgttctgattttcttcaaatatattaataagacttttttttatagtccctgtctgataattccattcttaagacactttgtgcctctgtttttattagtgatggctctttttgcttttctgttacatggtctgtgctccttctgagcctggttgtgtttgtagtttgtcccagacaatgtatgggaaaaatggtagagatgagagaacggagaacacttttactcctgttaatatttgcttctgacaacagccaccccatgggtaccagcaaccacacataaccttaattagattagggattgagaagatacgaagatgggcttcagtccctttaagcgctggtttgtttctggttcttgcatatacattctagggcataaatacagagaatttactagagtcttctctctcttcaataagtttttttttttttgagacagagtctcactttgtcacccaggctggcatatggtggcacagtctcggctcactgcaacctctctctcccgggttccagtgattctcctgcttcagccttccaagtagctggtatttttttttaatattttaagttttagggtacatgtgcacaacgtgcaggtttgttacatatgtatacatgtgccatgctggtgtgctgcacccattaactcgtcatttagcattaggtatatctcctaatgctatccctcccccctccccccaccccacaacagtccccagagtgtgatgttccccttcctgtgaccatgtgttctcattgttcaattcccatctatgagtgagaacatgtggtgtttggttttttgtccttgggatagtttactgagaatgatgatttccaatttcatccatgtccctacaaaggacatgaactcatcattttttatggctgcatagtattccatggtgtatatgtgccacattttcttaatccagtctatcattgttggacatttggcttggttccaagtctttgctattgtgaatagggccacaataaacatacgtgtgtgtgtgtctttatagcagcatgatttatagtcctttgggtatatacccagtaatgggatggctgggtcaaatggtatttctagttctagatccctgaggaatcgccacactgacttccacaatggttgaactagtttacagtcccaccagcagtgtaaaagtgttcctatttctccacatgctctccagcacctgttgtttcctgactttttaatgattggcattctaactggtgtgagatggtatctcactgtggttttgatttgcatttctctgatggccagtgatgatgagccttttttcatgtgtcttttggctgcataaatgtcttcttttgagaagtttctgttcatatcctttgcccactttttgatggggttgtttgtttttttcttgtaaatttgtttgagttcattgtagattctggatattagccctttgtcagatgagtaggtcgcgaaaagtttctcccattttgtgggttgcctgttcactctgatggtagtttcttttgctgtgcagaagctctttagtttaattagattccatttgtcaattttggcttttgttgccattgcttttggtgttttagacatgaagtccttgcccatgcctatgtcctaaatggtaatgcctaggttttcttctagggtttttatggttttaggtctaacgtttaagtctttaatccatcttgaattaatttttgtataaggtgtaaggaagggatccagtttcagctttctacacatggctagccagttttcccagcaccatttattaaatagggaatcctttccccattgcttgtttttgtcaggtttgtcaaagatcagatagttgtagatatgcggcgttatttctgagggctctgttctgttccattggtctatatctctgttttggtaccagtaccatgctgtttggttactgtagccttgtagtatatagtttgaagtcaggtagcgtgatgcctccagctttgttcttttggcttaggattgacttggtgatgcgggctcttttttggttccatatgaactttaaagtagttttttccaattctgtgaagaaagtcattggtagcttgatggggatggcattgaatctataaattaccttgggcagtatggccattttcacgatattgattcctcctacccatgagcatagaatgttcttccatttgtttgtatcctcttttatttcattgagcagtggtttgtagttctccttgaagaggtccttcacatcccttgtaaggtggattcctaagtattttattctctttgaagcaattgcgaatgggagttcactcatgatttggctctctgtttgtctgttattggtgtataagaatgcttgtgatttttgtacattgattttgtatcttgagactttgctgaagttgcttatcagcttcaggagattttgggctgagacaatggggttttctagatatacaatcatgtcatctgcaaacagggacaatttgacttcctcttttcctaattgaataccctttatttccttctcctgcctgattgctccggccagaacttccaacactatgttgaataggagtggtgagagagggcatccctgtctgtgccagttttcaaagggaatgcttccagtttttgcccattcagcatgatattgactgtgggtttgtcatagatagctcttattattttgagatacatcccatcaatacctaatttattgagagtttttagcatgaagggttgttgaattttgtcaaaggccttttctgcatctattgagataatcatgtggtttttgtctttggttctgtttatatgctggattacatttattgatttgcgtatattgaaccagtcttgcatcccagggatgaagcccacttgatcatggtggataagctttttgatgtgctgctggattccgtttgccagtattttattgaggatttttgcatcaatgttcatcagggatattggtctaaaattctcttttttggttgtgtctctgctcagctttggtatcagaatgatgctggcctcatgaaatgagttagggagattccctctttttctgttgattggaatagtttcagaaggaacggtaccagttcctccttgtacctctggtagaattcggctgtgaatccatctggtcctggactctttctggttggtaagctattgattattgccacaatttcagctcctgttactggtctattcagagattcaacttcttcctggtttagttttgggagagtgtatgtgtcgaggaatttaccatttcttctagattttctagtttatttgcgtggagatgtttgtagtattctctgatgatagtttgtatttctgtgggattggtggtcatatcccctttatcattttttattgcgtctatttgattcttctctctttttttctttattagtcttgctagcggtctatcaattttgttgatcctttcaaaaaaccagctcctggattcattaattttttgaagggttttttgtgtctctatttccttcagttctgctctgattttagttatttcttgccttctgctagcttttgaatgtgtttgctcttgcttttctagttcttttaattgtgctgttagggtgtcaattttggagctttcctgctttctcttgtgggcatttagtgctataaatttccctgtagacactgctttgaatgcatcccagagattctggtatgttgtgtctttgttctcgttggtttcaaagaacatctttatttctgccttcatttcgttatgtacccagtagtcattcaggagcaggttgttcagtttccacgtagttgagcggttttgagtgagtttcttaatcctgagttctagtttgattgcactgtggtctgttcttttacatttgctgaggagagctttacttccaggtatgtggtcaattttgggataggtgtggtgtggtgctgaaaaaaatgtatattctgttgatttggggtggagagttctgtagatgtctattaggtctgcttggtgcagagctgagttcagttcctgggtatccttgttaactttctgtctcgttgatctgtctaatgttgacagtggggtgttaaagtctcccattattattgtgtggcagtctaagtctctttgtaggtcactcaggacttgctttatgaatctgggtgctcctgtattgggtgcatatatatttaggaaagttagctcttcttgttgaattgatccctttaccattatgtaatggccttctttgtctcttttgatctttgttggtttaaagtctgttttatcagagactaggattgcaacccctgcccttttttgttttccatttgcttggtagatcttcctccatcctttaattttgaggctatgtgtgtctctgcacgtgagatgggtttcctgaatacagcacactgatgggtcttgactctttatccaatttgccagtctgtgtcttttaattggagcatttagtccatttacatttgaagttaatattgttatgtgtgaatttgatcctgtcattatgatgttagctggttattttgcttgttagttgatgcagtttcttcctagtctccatggtctttacattttggcatgattttgcagcagctagtaccggttgtgcctttccatgtttagtgcttccttcaggagctcttttagggcaggcctggtggtgacaaaatctctcagcatttgcttgtctgtaaagtattttatttctccttcacttatgaagcttagtttggctggatatgaaattctaggtgaaaattcttttctttgagaatgttgaatattggcccccactctcttctggcttgtagagtttctgccgagagatccgctgttagtctgatgggtttccctttgtgggtaacccgacctttctctctggctgcccttaacgttttttctttcatttccactttggtgaatctgacaattatgtgtcttggagttgctcttctcgatgagtatctttgtggtgttctctgtatttcctgaatgtgaatgttggcctgccttgctagattggggaagttctcatggatgatatcctgcagagtgttttccaacttggttccattctccccgtcattttcaggtacaccaatcagatgcagatttggtcttttcacatagtcccatatttcttggaggctttgttcgtttctttttattcttttttctctaaacttcccttctcacttcatttcattcatttcatcttccatcgctgatacccattcttccagttgatcgcatcggctcctgaggcttctgcattcttcatgtagttctcgagccttggctttcagctccatcagctcctttaagaacttctctgtattggttattctagttatacattcgtctaaatttttttcaaagttttcaacttctttgcctttggtttgaatttcctcctgtagctcggagtagtttggtcgtctgaagccttcttctctcaactcgtcaaagtcattctccatccagctttgttccgttgttggtgaggaactgccttcctttgtaggaggagagtcactctgctttttagagtttccagtttttctgttctgttttttccccatctttgtggttttatttacttttggtctttgatgatggtgatgcacagatgggtttttggtgtggatgtcctgtctgtttgttagttttccttctaacagacaggaccctcagctgcaggtctgttggagtttgctagaggtccactccagaccctgtttgcctgggtatcagcagcggtgtctgcagaaccgcggattttcatgatccgcgaatgctgctgtctgatcgttcctctggaagttttgtctcagaggagtacccggccgtgtgaggtgtcagtctgcccctacttgggggtgcctcccagttaggctgctcgggggtcaggggtcagggacccacttgaggaggcagtctgcccgttctcagatctccagctgcgtgctgggagaaccactgctctccttaaagctgtcagacagggacatttaagtctgcagaggttactgctctctttttgtttgtctgtgccctgcccccagaggtggagcctacggaggcaggcaggcctccttgagctgtggtgggctccacccagttggagcttcctggctgctttgtttacctaagcgagcctaggcaatggcgggcgcccctcccccagccttgctgaagccttgcagtttgatctcagactgctgtgctagcaatcagtgagactccatgggcgtaggaccctccgagccatgtgcgggatataatctcctggtgtgccgtttccgaagcccgtcagaaaagcgcagtattggggtgggagtggcccgattttccaggtgccgtctgtcacccctttccttgaccaggaaagggaactccctgaccccttgcacttcccgagtgaggcaatgcctcgccctgcttcggctggtgcatggtgcgctgcaccgactgtgctgcgcccactgtctggcactccctagtgagatgaacctggtagctcagatagaaatgcaggaatcacccgtcttctgcattgctcaggctgggagctgtagaccggagctgttcctatttggccatcttggctcctccccaagtagctggtattacaggcatgcaccaccatgcctggctgatttttgtatttttagtagagacggggtttcaagacgttccccaggctggtcttgaactcctgacctgaagtgatctgcccgccttggcctcccaaagtgctgggattgcaggcatgagccactgcacctggccctctcttcagtaagtcttgagctcaaaattttccacttttctcttaagtttgtcaaggtttgcttaaaattttagcctcttaagcattattaaataatcaccacaggctctggaaaggtggcctcaaatcttggtattctctcagggctcccctctcttcctggatcttgtccctgcaattcctcactgctctattagtattctggtgcccttaagcatgatttttttttttttttttccccaagctcttctaattgttctcactggagagttgatgagaaccacctagttgatcatcactgatagcagaacagaaattctaagtggaaataaatatcatatgtgctctctaatttgtggaagctaagaaagtggatctcacggaagtagggagtgtagtggtggttaccagtgactgggaagacagtggggagaggagaagttggttaaagggagtaagttagatggaagaggccaggtgcgttggctcacacttgtaatcccagcagtttgggaggccaaagagggtagatcacaaggtcaagagattgagaccatcttggccaacatggtgaaaccccatttctactaaaaatacaaaaattagctgggggtgatggcgcatgcctgtagtcccagctactcgggaggctgaggcaggagaatcgcttgaacccgggaggcagaggttgcagtgagccgagatcgcgccactgcactccagcctggtgacagagcgagactccatctcaaaataaataaataaatacaattaaataaaaaagttagatgaaagatatagttagatagaaggaataagttctagtatttaatagtatagtagagaaattatagttaacaataatttattgtacatttcaaaataactagaagagcagacttgtaattttcccaacataaaagataaatgtttgaggtggtagataccccgatgatactgatttcatcattacacattgtctgtgggtatcaaaatatcacatgtacctccaaaatatgtacagctattagatataaataaaaaaatctgtaatgcacctttataattgataccaatttattatggttgaaattttgtctcctaaaacctgaagaggtttaggagacagagccctgaagagggctgtgggagataaacccacaaaattcttttaatctgtatagactgagaattgtaagcacttttactaaaggaatctttcttgtaaatgttgcctttcaaggctaccactgaagatattccctgaagggttcagctctctcagagcttctcgtttcatctttgacatgctgttaaaggaagagaaatagtcttgtcatggaggaaggccaacgaaaatctctgctgccttattgatttatttttaaaatcaggattaggtagtgttttactcctcctcaaagaagagggaagtcatttggcatcttctacttgcagttcccatgctcttaatttcagtgatttccttattcagttaacatcagttataaaccattatagccaaagaaattcaaaaagtattgtaaaatagtatgtacttgggcatatttatgtgtgtgtaaatgcacactcagtcacacacacccctgttatccttagctctccttgttgattttatttttgatatctcaagacaaggtatcatgtactatgctaattaagtttccaagatctaaagcttgaagataccgcagaggccttggagtcacagctcccaggtagccaaaacaatggactgaaactaataagaaattaagcaatgaattatacaaaatcttgtattacgggttaaaaattagtgcagaagaatgggctgtgggaaaggcctggatgtgtggctgactactggctctgcgtcagctcgtaggtgtaggagctgacctgtctaagctgtaggtggcagtggacgaggagtaggaaattgcagttgtcatggttaatgaatgccacctgtgagagattctcagcatgggaaatttactcttgcatcattggaagtgaattgtctgtaaatattcctgtcttggataaaagagccatggtgtctatactctggggagaggacttagagagggaggagaacttatttactttattttgtggagagaaggcacgtgttaggctaactctttagttggtttcaaatttcaggattgttaaatgagtttataatctaaagtatctattttaagaagtccacacagagaagatattatgatcagagatttagattaagcaaattagggtaaggctgctcactgattgccaaagtatatttcattaagtgcaaatggatgaaatttacaattgaaatcactagtcaggaaacagtttgtttaagttctccattaagaagttttattgtcatttgaagtaacctttaacacactgtgttaaaggtctctcgtagagagacacacatcttattttggaagttattctttaaccctattctaaaactttaaattgtagtagagtagatatacactaatgtggcacgatatcaaaaccaattcagtgggttaccacaaagtgaaccccgttaagctgtcaccacccaatacagaccttcgctcctccagagctaaactgtttgccttacttcaaacaccaaagtctagttttgcccttctctggaactctgtataagaggaatcacccaagcacacagcatgcgttctttgggatctggcttttttggttcatttttatttttgtgagccacccaagttgttgtctgtagctcttctttcttcatttctattgtatgaatataacaacatgtattattatattgatggctatttagatttcttctagattttgtctgctttcaagaacacttcaaggaatgtgttacatgtcttctgacggacaggagtatgcatttctctctgatacagacgtaaaagtagattggcggggccatagggcagcgtgtttttaacttttctggatgatgctaaacaattttcaaaatggttataccaattagcattcccaccagcagtgtatgaaaattcttgttgctctacatactcaccaacgcttggcatttttagtctattaaatttaccattctagtgggtgtggagtgacattttcttgtgattttaattagcatttccctgattacagctaaggttgaggagattttcatttttttattttccattttgatatattattttgagaagtgtctaatcgtgtctctttactatttctctctctcttttttttttgttttgtgttggtttgtttttttctttattgatttgtatgagtttttctgtattacagatataaacccgtagtcattgtctttgttttgtgctgttataacagactggagactgggtaatttattaaaaatagaaatttatttctcatagttctggggatggtaaagtctgatatcaaggtgccagtatctggcatatcttgctgcttcacaacgtggtggaaggcatcacatggcagaagggcaaagagtgggtgtgagagagagagagcaagagggctaaacctgctcccttcataatgaacccactcccaaggtaactgcattagtccattcaggagggtggggccttcatgacctaagcatctcttataggttctgtctcccaataccatcctagtggaaattaaatttcagcatgagttttggaggggtcaaacattcaaaccattgcagttggccaggcgtggtggctcatgcctgtaatcccagcactttgggaggccgaggcgggcggatcacgaggtcaggagatcgagaccatcctggctaacacagtgaaaccctgtctctactaaaaatacaaaaaattagccgggcgtggtagcaggcgcctgtagtcccagctgctcaggaggctgaggcaggagaatggcgtgaacccgggaggcggagcttgcagtgagctgagatcatgccgctgcactccagcctgggtgacagagcgagactctgtatcaaaaaaaaaaaccaaaaaacaaaaccattgcagttatatgttttgcaggtatcttagactctttggcttattgttttactttttgacattctttcttttctccttttgtaaactttcaattgaagtatgacatgcttacagattaatggtgtcttttggtgaacagaaattcttaattttagtgtggcctagtttagaaatcctttcttctacatttagtgcttacagtgtcatattttaaaagtctttcccttccccaagttcatgaagatatttttctgtattttttagaagctttccattgttgttttagtgaatttttgttactgttttacctctcatgtttgtttataacccacctagaattgatttttgtgtataaagtgtatcacttttaagcagttttatggaaattggactggtgactaatttattttgtttttcaagagttgtgaaagggttgttagtggaattaatgcatgattgtttaactgtatcacatttggacattgtattgtccactatgcctgtgccctaatggacattttaattatttaatgtgtgtatgatatgaaaataatgtatgggtaatggaaatttttaatatttaaaaatgttgacatcacacacattatttacaaagtcagtagtaaagaagggcttatgagaagccctagcccctggccccaggtttcccatcaccatcctaagacaggtacttttaacaggctctgtttcaggtcatcactaatattttaacattctgcttatgtttctatttcttgattgattaaaatatcaaattctctggacctttactgaaattaaaatgcctttaattaaatatcttcagtatggatgttcttatttttaggagggattttgttaacaaagaaaacattaggcaaattcaatttagcagacgttatatgagcaaagaacaattcatgaatcaagcagcactcaggaccagaagaggttcagagagcttgactcagtagtgtgagcaaccagcttttataggctgaacacagaagcaaattagataatctgattggctaccactaggcacttgtcttacttggcatggggtgatgaattggctgcctgtgattggctgaaatctagctgttcatggttagctgaaactctgctgttatagtcctaagttaggttttggtttgtttgcttaataaattaggttgcctttgttaagtaggaactcaaagatgggagatagtctccagccagtggccttctgcttatttcatttagcagtttgtttattaggaatggcagtgtgtccctcaaatcaggatctgatgatgaaggttgttggctaatgattgagatagagatgggtttttttgtttgtttttgtttggatgcctatctgactctgaaggaaaagaaaaaaatttccctaagtttcttagcaaatcaaaagccttctacactgactgattttaaggataggctgtaattaggtaatgaacattttggtgtgttaacttggaaaaccccaactttatagccatagctaatatattcactgaaatatatttcgggttttgaaaatcaattggccaaaagctttaaaaacattctttttaaaaacaacatttaaaaactttcttgcagagttttcctttaaaaataaaaagtgctactttttaagcctttgatcaaatgttgacactcctcaactttgtgactgaatcatttaggacaatattttaaatttgcctaaaatatctgtaggttaaagatcaagaaaatttcttgattaaaagtgaaaggataacagatatgttgataaaaatggacaacgtccatagaatcctgatacttgcagacattcaggtgtttgtagttactcttcagggccacatcctataaacaactagaaatcaggatatacatgtaagtcaggtaaatttcagacagcctgtaatgtttcaagcaggaagatgtctccagatctgtcctggaggcttccctgttctttatattaccggtcttgcattttacaacttcagactaaacagaaactgtatcagaggcctttgtcttagtgatttaggccagggagtgatttacactgactagtggtcctaggagcagtaggcttttaattctgcttcctgcactctaggattgactatcatgctgttgaagatgatgtgtggctgcagggtgcacctccttgcctcctttccctctgaaacatgcagggttgttcggaccctccatcctcttccatgcacaaagcagttaatgcaaattccgtggtccaagacaatcctttgacagtaaccatcagtcatgcattaaaacagcagtgtacagatggtaccttcattgtttctgacagggacagttatgggcattggattaaagtaaaaactgaaaaggaatattcatgacaggaaattttccctttccgggggtgttttgcaacagcgggaagcagctggtcattgatgtgtcggcacaaggcagcttcctggatttccactggcttcctggatttttccaggtgtcacttggaaagtgtactgaattagtgcttgaaacttagtgttagagtgctcgaaacttagtctcaaatagaggaaatgaacacagagtaggatacataatgtggcattgtttggattgggaatgctgtacttatttcagaaatgccactcttttggaggaaaattagtttcctccttactttattgttaaatctgggaaatctggaaagggctgtgggggcagaactagagtgggctggtattcagggcctcctaataggtggctttggttgtgtgactttggatgcatatatcactgtgtatatttgaaaaaagccctaaagtaacatcatctatatgtatataactttaaagaactttaacatttttaaagcactttcactgatgtttgtctctttgatgatcatgtgaaatggtgttcttaatgactgtacctgtctaggcagagaacattttgggacctgaacccaggtcttctttgtatttttttttttctttttgggacagagtcttactctgttgcccaggctggagtgcagtggcataatcttggctcactgcaacctccgcctcctgggttcaagcaattctcatgcctcagtctcccgagtggctgagactacaggtgcacaccaccatgcccagcacatttttgtattattagtagagatagggttttaccgtgttggccaggctggtctcgaactcctgacgtcaggtgatgtgcccgccttggccttctgaagtgctgtatttttttgttttcaggatatttctgtttatttgctcattaaatgaatggattatgcagtagccaagataattgaaataggtgaccagtgagattttattttcagtttgaactattgatttttttggcatttgatatgttttactccattgcagttattctttctgatgcttgaactgtcagattggctcctgcattgttttgctttggtcactgtgatccttaatcatttcttctatttcctggcagaaaataaaataaggtgtcctgggctcactgtgtgtacctcccaccacagactggaatctgcctttgctaaggagcattacagtgggaaattaaatttagaagccacagactgacaggaggtattggaagaaattccaacttgagtctaacagatatctcagaaagagacaactgagcgaatgggaagtacagatatagagaaatgatttttttttgttttgtttgttttctaaaagcttctagatttgagggaaaacacaaacacatacttagaagcagcagacccacttcatccttcaattccagtacatcaggtgtaaggaaaaaaaggctatttaggacattacagagggctataacgcccaagctccgatgagaaactgattagtatcctaagatctctgaaacgccaagtagaaaagcaaaaaaaaaaaaaaaaaaaaaaaaaaaaaagtgttttcatgtatgcaaggattcaaagtttaccacccacaaattatctgaaagaattgctggaataatgtaatccagttatgcaaaaccaaaatcaaactctaagcagaataagtgagatataataaatccaagcagttagagtccagaaaatttggcattaagcctaattgtcagttgtcaaacatcccatgaaacatcaacagcaatctataactgaaacttcagaattcactctacaaacggtcctggaggagtgagggtagtgtatttcagaggtagaaaaagcagagaagaaatgcattctaagatacttttctatatctatatcatctatttatatgtatacctgtatatacatacctgtgtgtgtgtgtgcacgcgcacacacgcacgcatatggactgatttatgaaggcatatatagaaaaaataaattatgcattttcacataactttcacataaacttgtaaataaccactgtaagaatagaaataggatataaagttttcaaaccttgaagggcaataatggaacaaagaaaactgaacaatccaataaaactaagaaatgctttaagaaaacacaagaaaagtctggtaaacaggcaacatattatgacaacagaaacccaatcttatccgtaatcaccatgttgtgaattggacattttcagttgaaaatgttccagctatggccactttcaagagatagacttaaatcacaaattctcagacaaaaataagtaaataggcagataggcaaatggagatggggaaaagctgcagcaagcagatattaacagtggttacagaactgtatcttgctgtaatgggggctaattgaggaaaaccatctgcggcgggagggcgtgtcttcactgaggtgcgatggcattgttggctgctgaagcaggcatcagagtccgagaggaggacagagcacgtagccacaggatgagcacacccaccaagggctgatatgcagagctgcctacccgaggagcattgtgggccaggagagctttggattcatcacaagagcaagagatgcatggcagccctgtttcacaataagcatgttatctcactcagtccttgtggcaagcccattggatgtactgtcattctcccgatgttgttgattggataccaatgctggccagattcatggtgcttgtaggagtggaaccaccatgctcagcgggactagacagctgccaaacagtggaggctcaggaaaccccttcacttaagtgccagcctcacccagcccggacctgggaggaagccaggtagtggcaacagaagaggaggaaggaaagtcatccaggcacgtttcctgcgtggaaagaacagcctaagattgctcaaggtctggttcaaatggaggtgtccataaagagacttccagatcccttcccatcagaattaaccttttgcactcccacaataccgaaatactttacttatttatatgtggctattaggacaattcagagagagacaaaatgtttgaattcacaagaacaacatttaaaaatgagataaggccaggtacggtggctcacgtctgcaattccagccctttgggaggccgaggggggtgaatcacttgaggtaaggaatttgagaccagcctggccaacatgatgaaaccccatctctactaaaaatatagagattagccgggcgtggtggcaggtgcctgtagtcccagctactggggatgctgaggcaggagaattgcttgaacccgggaggcggaggttgcagtgagctgagattgcatcactgcccttcagcctgggtgacagagtgagacttcatctaaaaaacaacagcaacaacaaaaaacaccaaaaaaacaacaaaacaaaacaaataagatgagaccctcagtaattatgtgagcttgggaaagctaccacacctcttacattctgttctttaaagtaataataattcctgtgatattgtcacaatactcatgattggtgatactttttaaaattaacattttggtaatataactcttgcccatagtttaaaagctgagataattctgtgaggattattgttctctgcttccatttacatttctcatagacaaccaattctaactcttttagctgtttctttgagatttacgtgcatatcttgaaataaaatgcttatattaccactttttgctttagttctgttgaacaatggagaacctcacaatactgaaggtgaggacttagttctctgttcactctctacctccactaccacgcataattaacacacttcccttcatttatcacatttacctaatgaaattacataatcatttttgtttaaattaatatataatgtttatattaaaatctgtaaactcatgattcacagctgagagccatgcaataggctatattccttttccttagagttaatactattatctttggccggttgttgaatttttcatgtaatgatcactattctatccccaaactctccagtagacctgtaattttctctccccatgttcagacacgtggatctgtgtcttccatgttgttagagacatcttttgaagcattttatcctcctgcttgaatgtaaattgattgtttcctagctctgttctgcagctgtcagactgatattttcttttatgattgccttttgtcaacagctttctgacatcaactgagtattctatgacccagttcgattcagacactaccttgcacttctgcctggccatctacacatttggggcttcctacaacttcctcacatttgttaatttgctataacaactcccagaacttggtgctaaatagtcatttgatgatgaggatgcgttctgagaaatgcattattaggcgatttcgttcttgtacaaacatcagagtctacttacacagacctaggtgttatagcatactacacacttaggctatatggtagagcctattgttcctaggctataaacctgtacagcatggtgctttactgaatagtgtaggcaattgtaatgcaattgtaagtatttgtgtatctaaacatagaaaaggtgtagtaaaaatacagaataaaagataaaagaatgatatacatatacagggtagttaccgtgagtgcagcttgcaggactggaagttgctctggtgagtcagtgagtgagtagtgagtaaatgtgacggcctgggacattactgtgtgctactgtagacttcgtaaacactgtacacttagactacactaaattaaaaaaaaaaagtaattgcactgtgatgttatgacagctatgacatcactaggcaataggaattttttagccattataatcctatgggaccactttcagatacgctgtccatagttccctgaaatgtcattatgtgacacataattgtccttgtgattattgttttattataaaaatgcaaatgagcttccaggtgaaaagttacataggacaaagtctaggaagtcctaagcacagggtcttctgtctctgtggagaccagcagtgccatcctcttcatacattgatgtgttcaccaaccaggtagtttccccaagccttgccgtctggagttattgatggagtttcattttgtatgcatgattgattaaacttttgaccacatgattgagctaaattttcagcatccctccccttcttggaggttaagcctcaagttccagttctccaatcacttggttggtttctctggcaaccagcctccatcctgaaaccacttgagggaccccttccatgagccacttcattagcataacaaggaatttctgatttctgtcactaagagtttttgaagctctatgtcaggaaccatggacaaagaccaaatagctactttgtattatttcaatagctatcaactagagaatttcccttgccattctccatttgtggatccagatcctctttcctggtttatcttctcagttgatggatggtgtcctttattacagtttgggaaagggagcatagcaggattttgaagaccttatttttacccttacacttgatgaatagtgtggctaggaataagttgaatactttttcttagaattttgttgtttcttttcttattccaatgttccagttcccaatagctttgttttgctctctgaatgtttcttgttggaagtatctgatttttgttagtatttttaaagcaatgccgttgctctgttatagtactgaagttgtcctcgtcttcctccttcttcttctttcttcctccccgtgcccctttcccttccccttcttctttctttcttctgcttctgctgctgcttcattttcttcctgctccttgatccttctacttcttgcttttgctttttatggaatttttcttctacttcctgtattgtctgcatcctcaaagtcccttatctgttgtttattttggtctctatttgtcatattagagcctttctcatgatgataggtgatctttggtagaagctgtgtgtgtgtagtgtgtgtgtatgtgtgtgtatgtgtgtgtgtggtgtgtgcaggcagggggttcccatatgtctgtatggtagtggtggtgatgttggagaagtgggcttcatcatagcatgatttggatgggaacgtattttggggaccttaatatgattaggtcttttctcttcattggatcacatttcccagagaaaatttttctagtatgctacctgggcagtatgtgcctggcagtcagagctctggaaaccaaaacaagggaggggctgggggtcatgcattcttaacccacctctgttgtcagtatgcatctgtgctcttgctttacctatgctcatcatacagagtcctcctcatatttcctcttctgagaataaaatgctaatattatgccatggccaagagaggcagttgccacttgtgcattgtggttcttaaaatgaatatgcaacagagcctatgaagaacttttaaaatatgagtgttgaggtatgtatgtgaaaatagcagaataatggcctcaaaaattatttcctccataaaatcagaaagaagaaggaaactgccaacatttgccaaaagtaagtttttcaaaactttagaaataaactaagaggagaccaaaagctagcagcaatctggggagcatttattttttataaaaataggccgaatcttggtaagaacagtgacttttgtgacattttaacctgccctatttccttctcccatctccagctccctggtagccttgaatctgcaattcaggctgcaatcatgatgaaaccatcagcctttctgtcaccaaagtggagagaacagagttaaagctcctcagagtctcactgttggagaattgtcagtatttggtctgtctggtggttcagtagaagaccccacttgcaagactatttttacttgaccaaatgcagagctttcccagtctagaaagccttttccctgggttgttgggttgaaaatttagaagtaattgcttaaccttggggctgcctgaggcagtggatatcaactgaggaagataataagctataaaaagatgaaaaggaaaggctggggaattcgatgtccacaagttctttgaaaagctccaaaaaacacatgtaaggctgtgcacatgctcaggaaaaatctgagaaggccttagactctcacctctgactgaccttgagactgtgcacaggcaggaagtgaaggctaaagcagggctgtcagctgcctggctgtgtgcggaaggtgtgccccagcacacaacacagcccactgcaaacactgggggcagagctgtcagctgcctggctgtgtgtggaaggtgtgtcacagcacacagacatagcccactgcaaacactggggacagagctgtcagttgcctggctgtgtgtggaaggtgtgccccagcacacaacacagcccactgcgaacactgggggcagagctgtcagctgcctggctgtgtgtggaaggtgtgccccggcacacaacatagcccactgcaaacactggggacagagctgtcagctgcctggctgtgccgaagatgtgctccagcacacagatgcagcccactgccaacactggggattcatggatgccaagcattgaaggaaatctcagtttcctaaatagctggcaactcatataacaaaggaaagactttagtgagtatacacaacaaaagatacagactttacagaattagttgagaaaagttactgaataaacaaatagcagcaacaacaaacctagggttggaggatatactttccagatttttcacattatagtatttttttttttttttgagatggagtctcactctgtcgcccaggctggagtgcggtggcgcgatgtccactcactgcaacctccacctcctgggttcaagccattcttctgcctcagcctcccaagtagctgggattacaggcatgtgccaccacgcccagctaatttttgtatttttagtagagacagggtttcaccatgttggccaggatggtctcgatctcttgacctcatgatatgcctgcctcggcctcccaaagtactgggattacaggcatgagccaccatgcccagccacattgtagtatttaaaatgtccaattttcaaaaaatatatgtatgagacatgcagtgaaaatttaaaaagcagatggcatatacagagggaaaaacaaaacagagtcaataggaattgtcctaagaaagcccagatgttgagtttactagcaaaacactttaaaccagttattttatatatgttcaatgcagtaaacactgtctaaaacactaaaggaaagtataagaatatctcaccaaataaataatgccagtaaagatgcatagacataaaaaatttgattctggagttaaaaattccaataatgaaaatgaaatattaactaatgagtttcaataaaggattcgaacaggtggaagaaagaaggaacttaaagacggatcaactgagtttatcccatctgaataactgagaaaaaaaatggggaaaaatgaactaagcatcagaaacctgtgagaaaacaatcatagcaacatacgcaaaagagttatcctagaaggaaagaggaaagaaaggggcagaaagaatacttgaagccaaagggagtaaaagcttcccaaattgggtgaaaaacattgatgtacacatccgtaaagcttaacaaactacaggaaggataaaaccaaagatccacacctagatacatcataatcaaactgttgaaagacaaagagggaatcttgaaagcagcaggagagaaccaactcatcacatgcaaagtagccttaatcagatgaacagctgatttctcaacagaaaccatggaagatagaaagcagtggaaaaggatattttcaaagtgctggaagaaaagactttaagaattctatacccagtaaaaatatctttcaaaatgaaggagcaattaatgcattttccaattttagagaagctgagacaatccactgctggaaaattttccctgcaagaaaatactgaagagtactttaggtgaaatgaaaggagggtaattgggatctataaagagataaagaatatcagtaagtaactacctaggtaaacataaaagacactgtaaatatattttgtgttcataactctttttttctcctctctgatttgagatgcaactgcataaagcaataattataagtatgtgttgatatgcatacagtgtatataaatgtaatttttaatgcaacaacaacacagaggaggagaaagcaaagttatacagggggaaagtttttgtacactattgctttaagttagtatcaatccagacaagattgttagaagtcaagatgttaattgtaattcccgggaaaaacagctttacaagaagtaagtgaagtgacaaggaaatgaaaatggtacagtggagaacatctgcttaacaaattagaaggcagtagggaaggattgggggaagcacacaaggcatgtagaaaatcataaaaagcacctaagacatatagaaaatagcaaactgggcacagtggttcacacctgtattttaagccctttgggaggctgagacaggaggattgcttgaggcctatcgttggaggctagcctgggttacagagtgaggccctatctctacaaaaaaaagaaaaattaggtaggcatggtgactcacacctgtagtcctagctactcaggaggttgaggtgggaggattgcttgagtgcatgagtttgaggctacagtgaactgtgattacactgcactctagcctgggtaacagagtgagaccctgaggaaggaaggagcaacctgttagctgtaaattctactttatcagattgcacatggaagtaggtggattagacactccaatgaaaatacagagattgacagaataaattaataatttggctgtatatgcaagagacacattttagattcaaaggcacaaataggttgaaaataaatagatgcaaaaagataataccatgcaaacagtagtgaagctagagctacagtggctataccaatatcagacaaaatagacttcaaagcattactacatctctacatggtggtgggcgcctgtaatcccagctattcgggaggctgaggcaggagaattgcttgaacccaggaggcagaggttgcagtgagccgagatcgcaccactgcactccagcctgggtggcagagcaagactccatctcggggaaaaaaaaaaagaaaaaagtgttactacagactaaaaagagcatttcattgtaataaaaagtaaactggtcaggaatatatcacaattataaatacatatgacgtatcaatggggccctcaaatacatgaagcaaaaagagacagaattaaaggggagtaatagacaattcaacaaaaatagttgaagacttcggtacccctctttcaataatgatagaaacactagacagttaaaaaataaatggaagacttgaatggctttcgtctgctagctaatggacaccttttttgtgatacccttgtttcttgtgtataattttaaaacaactacataaagcaataattaaaatctgactgacattagacttaataatagagttaataaccattaggcttaaattagacctaatagacacatctataggacactccacagaaaatgaaaagacaactcacagaatgtgagataatatatgaaataatatatttcctaagggtcaagtatccagcatatgttaaagaaactcttacaactcaacaaaaatacaacctaatttaagaaagatcaaaggatatttatccaatgaaatactaaatgagtagacatttattcagtgcaatagtcaaagccactgaggctgggcctgatggccgaaacctgtagtcccagcattttgggaggctgaggcaggaggatcacttgaggccaggagttggagaccagcctgggcaacccatcaagacccaattgctacaaaaaaatttaaaaattagctgggtgcagtagtgaatggctgtagtcccaactcctcaggaggctgaggcaggaggatcacttgagcacaggaggtcgaggctgcagtgagctatgattataccactgcactccagcctgggtgatggaccaaaaccccatctcagaaaacaaaaacaaaaaactaagaaaactccactgaattctgtactttaaaaagataattttatcatacattaattatggctcattttttaagtataaatgcttgtgtccaaaccttcttatatcttgaattgttcagtgtgaaaagagatctaggttgctttttttttaaaacaaagcttcctgaattgtctgttgtgaatattgtgttagcaaacatagattttgaaaatcagcgaaacaccagaacttgaaacgcactctgggcacttaacttgaaagtactacatatgctatttttataattattttttatctgattttccccccgcccactagatttatctcaattgatgaagcatttattgtggcttcttaatagatgtctatttagaagaattataaacctttttaaaaaataagccagctttattgaagctgtaattgacatacaaaaactatatagtttaagtatacaggttgataggttgagacaagtttgtacactcatgaaaccattccgacaatataaagaacatttccatcatttgtaataggctgcgttttgttttgttttgttttttgcccctctgcagttcctcccttacacctcagcttcctctaacctccaggcaaccactaatctgatttgtcactatggattattttgctcactatttaattggattttttaaatgttgaattttgagagttctttatatattccagagataaaagtactttgtcagatatgtggactctaaatgtaagagtggtttccaatactcttaacaaggtattttccagcaaaaaaaaagtttttaattttcatacagtctaattttatttttcttctacagctcatgtttttagtgtcatgtccaagaacatttcactaagcccaggaccctgaagattttttcctatgttttcttaaaaaggtttatagtttaacattcacatttaagtctgcaatctattttgagttttttttgtgtgtgtgaacatgtgaggtttagttcctttttttttttttttttttttttttttttttttttgagacggagtcttgctctgtcgcccaggctggagtgcagtggcacgatcttggctcactgcaaactctgcctcgcggattcacgccattctcctgcctcagcctcccgagtagctgggactacaggcacccactaccatgcccagctaattttgttgtatttttagtagagatagggtttcaccgtgttagccaggatggtcttgatctcctgacttcatgatccgcccatctcagcctcccaaagtgctgggattacaggcatgagccaccgtgcctggcctagttcctttttttatatcgatgtccgattgctgcagccccatttgttgaaaagattgccctttattatccattgaattgcttttgcacatctgtcataattattaggctccacttcaggaggtctatttctagagtctttattctgtttcatttatctatgtattaatccctcaactaataccacacagcctagatcactgtaaatcttcaaatctggtgggatgattgcttatattccttctctttcaaagttgtttcagctactcttttccttttgtctttccatatacattttagaactatcgtatgtatatcaacaaatatattacagggattttgatatgattacattaaacctcgataccaatttgaggaatgttagcatatttattatattatttcagtttgtgaatatgtctgtttatttcttctttgattcctgtcattggtgtttgtaattttcaatatacaagtcaagtacacacttcgttagatttacacctaagccatttgatatggattgtcccctccagatctcatgttgaaatgtgatccccagtattggaggtggggcctggtgggaggtgtttggatgattggagcagatccctcatgaatggcttgctaccctccccagtataatgagtttatacaagagctggttgttcaaaagagcctggcacctcctcctctctctcttgctccctctttcaccacgtgacacacctgctccccttcaccttccaccatgattataagcttcctgaggcttcaccagaaacagatgctggcactatgcttctcgtacagcctgcagaactgtgagccaaataagcctctttttttttttttctcaataagtcagtctcaggtattcctttatagcagcacaaaatggactaacagtaaattggtactgaggagtggggtgttgctataaaagatacttgaaaatgaggaattaattttggaactgggtatgggcagaggttggaagagtttggaggacttagaagacaggaagattagggaaagtttggaacttcttagagactggttaaatggttgtgaccagaatgctgatggcaatatggacagtgaaaaccaggctgatgaagtctcagatagaaatgaggaatttattaaaaacgagtaagggcactcctgttacaccctagcagataactaggctgcattgtattcatgttctagggatttatggaaagttgaacttaagagtgataacctagggcatctggcaaaggacatttctaagcagcaaagcatttaagaggtgacatggctgcttctaacagcctactgtcagatgcaggagcgaagaaatgactcagagtttgaagttacatttaaaaggggagcagagtgtaaaagttagaaaatttgcagcctggctgtgtgaaagaaaaagcattttcaggagaggacaataagcagattgtgtcaggagaggactacaagcactagtggagcaacttctcccaaaagagatttgcatgactaaaagggaggcaagcactaatagccaagacaatggggaaaaggccttgaaggggtctcagaaatctttgggacagaagttcccatcacaggtccagaggcctgggaggaaagactggtttctgaggccagagctgaggcactgctgccctgcacagccttaggacactgcatccgtgatcctggaagctctggctccagtcatggcacagagggctccaggtacagcttgagccactgcttcagagaacataagccgtaagctttggtggtaccatgtggtactaagtctgcaggtgcacagaatgcaaaattgaaggaagcttggcagcttttacctagctttcagaggatgtatggaaaacactgggtgcccaggtggaagcctattgcaggggtggagctaccatggagggcgtctaatagggtagtgctgaggggaaagatggggttggagccctcacatggagtccccaccaggtcactgcctactggagctgtaggaagggggcaaccatccgccagacccatgaatggtagagccactgtcagcttgcaccctgagcccagcaaagctgcaggcagtcaactccaacttgtgtgagcagccacagagagggcacactctccaaagccacagggtcagagctttccaaggccttgggagctcacctctcacaacagtgtacccaggatgcgggacatggagtcaaaggaggttatattggagcttgaaggtttaatgttggccctgctgggtttcagacttgtgtgtggcctattgcccctttcttttggctgatttctccctttaggaatgggaatgtttaccaaatgcctgtaccaccattgtttcttgaaagcaaataacttgtttgtgatctaacaggctcataggtcaaagaaatttgccttgagccttagatgaaactttggacttttgattgagttaatgctggaataagttaagacatttggggactatttggaagggatgattatattttgtaataggagaaggacaagagatttaggggaccaagtgcagaatgatatggtttgggtatttgttccttctaaatctcatgttgaaatgtgatcctcaatattggaggcaggggctggtggaaggtgtttgggtcgtggggatggatccctcatgaatggcttgctgctctccccactgtaataagttcatgcaagaactgggtgtttaaaagaggctagcaccacttgccctctatcttgctccctcttttgccatatgacacacctgctccccttttgccttccacaatgattttaagcttcctgaggcttcaccagaagcagatgctggcaccatgcttcttgggcaacctgcagaaccagaaaccaaataaatctctttcctttataaattacccagtctcaggtattcctttttaccaatgcaaaagggactaatacattggtcttccttcattgttttccttcttcctgttcccattttctcccttccttcattgtcctccttcttcctgttcccattttctcccttccttctttccttccttcttattgttaaaaattgtaaatgttaatgtatatttaattttgatgtccatatgctcattgctggtgtatataaatcaagttgatttttggtatgttaattttgtatcctgcagctttgctaaactcacttattctgtttttgttttgtttttgtggattcttcgggattttctatgcagacaattatgtcttctgcaaacagccagtgttatttctttcctttccatctgtatgtgtttcattgccttttcttgaacttactgcactggctaaaacttctaacagtataacataacataacatagtgttagaagttttagccagtgcaataagttcaagaaaatagaataaaagtagagagagcaaacgtctttgccttgtttcctattttaagaagaaattattgattattttactactaaatataactgtagctataactgttttgtaaatgctgtttatcaagttgaggaagtttgcctttattccgacttttttgagttttataatgaataggtcttgaatttcgtcagatggttttttctgcggctcttgatatgaatcacattattaatattattattattattattattattattatttttgagacagagtctccctcttgttgcccaggctggagtgcagtggcatgatctcggctcactgcaacctccgcctcctgggttcaagtgattctcaggctcccgagtagttgggattacaggcatccgccaccacgcccagctaattttttgtagtttcattagagatgaggtttcaccatgtcggccagcctagtcttgaactcctgacctcaggtgatccacccacctcggcctcccaaagtgctaggattacaggcatgtgccaccgcggctggccagaatcacattatttgatatgaatttttttgtgtagtttttcttcttttgccttttctatttaagttttatattgattgattttcaaatattaaaccagccttaaatccctggaataaaccctggtttggtcatggaacataatttttttgtatatattgctgaattcaatgtgctaacacttattatggatttttgtgtctatgagagatattcatctatattttcttttttatactttctttgtttctgtaagcagggtaatactggcttaataaatgaattgagaagtgtttcctctttcaaattgtggaagcaatggtgtagaattggtgttaaaattattctttaaacatttgatacagtgaaatcgtctgggcttagagactttatttttaagagttttaaaattacaatttcagcatctttaatgttataggacttttaaaattatttattttgtattaggtgagttgtaatcatttgtcttttttgagggatttattcatttcgtctaaatcgtccaatttatgagtgtaaaattcttcatagtactttcttattatcctttgatatctgcaggatctgcattcatatcctctattttagtcctcatgctgcttatttgaatcttctctcttttttctttattagtctcgctaaaggtttttcaatgttactgttctttttagagaaccagctctttgtatcattgattttctctattgcttgctttcaatatcattgatttctgctcttacctctattttttccttcatccttcttgctctctgggaaatttttttttctctttttgtaggttcttcagataggagcttatattattttttgagtcttttccttttttctcatatatgcatttattattgtaaatttccttcagcattgcttgctttctatctcacaaattttaatatgttgtattttcatattcaaaatatatttttaaaaattatcttgattctttctttttgacctacagattacttagaatgtgtgttttttcaatattttagcctttggatattttcctattattcttccattgttaatttgattccaaattatactttgtgttatttcagttattctacatttttgagttttatggtccagagtatggcacattttggtatgtactccatggccacgtgaaaagagtattttctgcttttgttcattggggtgttgtgtaaattttagttatatcttgttggttgatattgttaagtttgtctgtatccttgctgattttctgtctctttctcttttaaattgtggagagacaaagtataaacatctccagctataattgtggatgcttctgtttctcctttcaattttgtaagttttgtcatctatgtgttttgaagtttgatgacacacaattaagattgctgtgttttcttggcagattggcctgtttatcgtcagatattgtctctccctatctatggtaattttctttgctctgaatgctttatttgatattatatcaggccacaacagatttatttagattaaggtttacatgctgtattttgttctattgttttattttcaaatcgtgtgtattgttttatttgatataagtttcttgtagacagcttatagtttggtcatgcttttttgttgctgtttttagtagattttatttttagagcagttttaggtttacaacaaaattgaacaaaagtacaaagatttcccacatatcctgtgtcaccccacatgcataatctctctcattattaacatccctgaccagagtggtacattgttacgattgacaaacctacactgacacatcattgtcacccaaaattcatagtttacattagtgtttgttcttggtgttgtacattctgtaggttagggtaaatgtataatgacctgtatctaccattataatatcattcagaatagtttcactgccccccaagtcttctctgctccacctagtcatcccttgctccacccaactcttgaaaacccttggtctttttatagtatctataattttaccttttccagaatgtcagctctgggaatgtatggtcccacagttgggagcatacagaatgtagccttttcagatttgacttctttcacatagtaatatgcatttaaagttcctccatgtctttttatggcttgatagctctttttttttttagtgttgaataataatccattgtccagatgtaccacagattacccatttacctactgaatgacattttggttgcttccagttttgggcaattatgaataaagcttctataaacatctgtgtataggtattgtgtggacatatgttttcaaatcctttgggtaaataccaaagagggcaattgctggattaaatggtaagagtatgtttagttttgtaagaaaatcctagactgtcattccaagtgcctgtaccattttctgttctcaccagcaataaatgagaattcctgtttctgtttgtccttgccagcatttggtgttgccagtgttctggattgtggccatttcaataaatgtgtagtggtatctcattgttgttttactctgcatttccctgatgacatatgatgtggaacatattttcatatgttgatctgtatgtcttctttggtgaagtatcagttaagatctgtcttagttcatttagtgttcctataaaggaatacctgaggctgggtaatttataaagcaatgagttttatttggcttacagttctacaggctgtggaagtatggcaccatcatctgcttctgatgagggcttcagtctgcttctactcatagcagaaggtgaaggaggaggagcatgtgtagagatcacatgataagagaggaagcaagagagaaagagaaagaggtgacaggctctttttaacaactagcactcactgctcttatgggaactaaaacagtggtaactcattaccaggaggatagtaccaagccattcatgagggatttgccccgtgacccaaacacttccccttaggtgccacctccagtgttggggatcaattttccatatgagatttggagggatcagacaaactatagcaaggtctttggcctatttttaaattgggttgcttgttttctttttgttgaattttaagcactgtttgatgtttttgtataacagtcctttatctgatttgtctctttcaattactttctcccattctgtgacttggcttctcattatcttgaaattttcttttgcagaggagaagtttttaattttaatgaagtccagtctatcaattctttctttcgtagatcatcctttggtgttacttctaaaaagtcatcaccataccaaagtcatgtaggttttctcttgtgttatcttctagttttatagttttgcattttacatttaggtctgtgatccattttgagttaatttttgtgaaggatgtaaggttgtatctacatttattttttcgtatgtggatgtgagttatttcagcatcatgtcttttaaagactattgggacctgtttttctagtctctgccaacgtgtattaaattactttatttaaaactagaaaacctagaagaaatggttacattcctgaacacatacaccctcccaagactgaacctggatacagtcaaatccctgaatagaccaatgacaagttctgaaattgaggcagtaataaaagcctaccaaccaaaaaaaaaaaaaaaaagcccaggaccagatggatttatagcttaattctaccagaggtacaaagaggacctggtaccatttcttctgaaactattccaaacaattaaaaaggagggactccaccctaactcatttcatgaggccagcatcatcctgataccaaaacctgtcagagatacaacaaaaaaagaaaacttcaggccaatatccctgatgaacttcgatgcaaaaaccctcaataaaatactggcaaaccaaatccagcagcacatcacaaagcttatccaccatgatcaagtcagattcatccctgggatgcaaggttggttcaacataggaaaatcaataaatgtagttcgtcacatacacagaactaaagacaaaagccacttcattatctcgataaatgcagaaaaggactttgataaaattaaacatcccttcatgttaaaaactctcaataaactaggtattgatgggacatacctcaaaataataagagccatttatggcagacccacagccaatatcatactgaatgggcaaaagctggaaacattccccatgaaaaccagcacaagacaagaatgccctctcccaccactcccattcaacatagtattggaaattctggccagggaaatcaggcaagagaaagaagtagagggtattcaaataggaagagaggaagtcaaattgtctctgtttgcagatgatatgatcctatatctagaaaaccccgttgtctcagcttcaaatctccttaagctgataagaaacttcagcaaaatctcaggacaggaaatcaatatgcaagagtcacaaacatttctatataacaacagacagagagccaaatcatgaatgaactcccattcacaattgctacaaagcaaataaaatacctaggaatacagctaacaagggaagtgaaggacctcttcaaggagaactacaaaccactgctcaaggaaatcagagaggatacaaacaaatggaaaagcattctatgctcatggataggaaaaatcaatatcatgaaaatggccatactgcccaaagtagacagatttaatgctattcccattaaattaccattgacattcttcacaaaattagaaaaaaaaaaactactttaaaattcatattgaaccaaaaaagggcccttacagccaaggcaattccaagcaaaaaagaacaaagctggagcagcatcactctacccaacttcaaactatactacagtgctacagtaaccaaaacaggatggtactggcacaaaaacagacacatagaccaatggaacagaatagagaattcagaaataagaccacacatctaaaaccatctgatcttctacatacctgacaaaaacaagcaatggggaaaggatttcctatttaataaatggtgctaggagaactggctagccatatgcagaaaattgaaactggatcccttccttacaccatatacaaatattaactcagggtggattaaagacttaaatgtaaaaccctaaaatataaaaacctagaagaaaatgtaggcactatcattcaggacgtaggcatgggcaaagatttcatgttgaaaacgtcaaaatcaattgcaacaaaaacaaaaattaacaaatgggatctaactaaagagcttctgcacagcaaaagaaactgtcatcacagtgaacagacagcctatagaatgtgagaaaatttttacaatctgtccatctgacaaaggtctaatatccagaatctacaatgaactaaacaaatttacaagaaaaacacaaccccattaaaaaaatgggcgaaaggcaagaacagacacttctcaaaagaagacatttatgtgggcaacaaacatatgaaaaaaaagctccacatcacgaatcattagagaaatgcaagtcaaaaccacaatgagataccaactcatgccagtcagaatggcgattattaaaaagtcaagaaacaacagatgctggcagggctgtggagaaataggaatgcttgtattctgttggtgggaatgtaaattagttcaaccattgtggaagacagtgtggcaattcctcaaagacctagaaccagaaataccatttgactcagccgtcccattactgggtatatatccaaaggaatataaatcattctattacaaagatacatgcatgtgtatgttcattgtagcactattcacaatagcaaagacatggaatcaacccaaattctcatcaatgatagactaaagaaatgtggtacatatacaccatggaatactacagagccataaaaagaaatgagatcatgtcctctacaggtacatggatgaagctggaagccattattctcagcaaactaatgcaggaacagaaaagcaaacactgcatattctcataagtgggagctgaacaatgagaacacatggacatggggtaaagcagggaacaacacacaccagggcctgtcgggtggggtcctggcagtgggagagcatcaggaaaaatagcaaatgcatgctgggattaatacctaggtgatgggttgataggtgcagcaaaccaccatggcacatgtttacctgtgtaacaaacctgcacatgtatcccgaaacttaaaatataaaattaaatttgaaaaataaaaataaataaattactgtacttagagtatttacatttaatgtaattattggtatgttaggggcttatgtgtgccattttatttctgtattttgtttatcttttttatattttacctgctttcctataggctatttgaacatttttaagaattccatttgatttattcatagtgtgtcccagtggaactctttgtgtatatataaattattccaatgagtaatactctattgtttgaatattagtcgtttttctaggtattatattatttatgaatagcttattcctgtctactaatgttattttaccagtttgcatgcagcatagaaactttacctccctttatcctctcctgtagttacctttactattttctccacatacattaaaaccatctcagacagttttatactttttccttcaaccaacaaacataacttagaatactcaacaagagaaaaaaagttccattatatttacccatatttttacttgccatatttttccctgctttctctccactcttccttcttttaatgtttcctttcaatctattgaactttagctattcttctgaaggtagatgtggtggcaacacaatcttttagttgcctcagtctgagaatttcttcatttttctttcatttttgaccaatatatttcactgtatataggattctgaggtgatctttttttcagcatttgaaaaggttgtttttcttcattctgaactctgtggtttccaatgaataatactttgtcatttgaattgtttttgcagtataggtaatgtgtcatttttctttctctgtttttaaggtgtttgtgtggtccttaatttttagaaatttgactgtgatgtgtcgtggtggagatttctttggatttatcttgtttggggtttgttcatttctttaatctatagatctgtgtcttttatcaaatttgtgaagtgttggtcattattcatgtactttttcaactccaccttcttcttttatctaggactccaattatatgattattagattttttttgtagtcccataagtctgacttttttttcagtttattttacctttgtttttcaaattgagtaatttctattctatctttgtgttcacaatctccacctgtaattcttagtaaagcaggttatatgtaagatgagaatgttttagagaacaactcagcatgaaaataatcagatcatatttgtggcaatacaggatgtaaaatatggggatcatagaatagaacttaacagttctttcaacagttggataatgcaattagtacaactttatgcaatgtcttctttccactgtatatcttatttttaatatgattattttgaaaaaacatactaattatataatattccattttatgtataagcaatgatgtattgctgggcagttaactttgttgataatattgcaagccctataaataacattataatgaacatctttgggtttctatttttgttaatgatcactgttttttagtataatttcttaaatgtgaaattagtagctcaggctgggcatgatggctcatgcctgtaataccaacactttgggaggccgagacaggtggatcactcgtggtcaggagttcaagaccagcctggccaacatgatgaaacactgtctcctactaaaaatacaaaaatcagcctcgtgtggtggtgcacacctgtagtcccagctacttgggagaatctttcatgataacctgactttctataaaatataaattaggacaaatgtattccttggtgctatggtttaaatgtgtcccccaaagttcatatgttgggatcttaattcctaatgcaacagtactgggaagtgggcctaataggaggtgattagctaataatgattaatattgttattgtaggagtgagtattgtgagagggggagataaattatctcaagagtggatgtgttaaaaaagtgagtttggtcccctcttgctctctctcgagtactctctagcccttctgtcttccatcatgggatgttgtagcaagaagccccattgccagatgccagcactttgaaattggacttcccagcctccagaactgtgagaaataaatttctttataaattactcccttcatgatattctgttacagcaacacaaaacagaccaagacactttatcaaattgcaaagaaacattgttgttctaggttataataaatgtaaaaactagtgcaaatttattttgggctacatgtgaagggatgagataaggagggtggatggtgtgggacagaaattcaactgttaactattatatagattcaaacttggacgtcatctacacatagcaatttattcctagccagttcagggtttataatgaaaaaatatttccctgacatattaagtggctcatatataacaaaaggtcatttatgaaggaaggaattactttggaaatttatgcaaactatttaatcacttaaattatgaaaaagttccaacgcaatttggttcctgattttgtgataggaacatttttcttggtaattggtgtagtggcctcatgtcaggagtcacttcattctccttttcagaagaagaaaagggtttatgaatggtctgtatttgattttttagcacctcactattcatcagtataagccctagattagatgggcaatggaattttgggctgaagaagggagaggtatagttttccttgtgttaaaactctgtttgattaattagaatgaactgccaaggtgtttctggacaccagtaatttattatcttcctacaagtctataagagaaggattagagcctaaaagtctgtatggaactcgctatttataaattttacagaaaaacaaacatgttggaaaactgcaagtttaatcagattctacaggacttcttagaatccttgtgacagcaatatgaactaagaattggtaggaggggttatagttctttctgtttaatgtctgtaatttacatagggctctcttagaccatagatttagggtgaccccagcctggtttcacaaggtaggacttccattgaattctctctcaccagtgtgttcctcgtttggagttcagcactggggactgactgggcggcaatgtgcatgagcacatacagtctcagaacatgcactttgggcaaagagcagagcccctttaggtcagggttggatttaccgtggtggctccagtagaggactgaagctttggcatatcatgttcaatgttccttcctctccatcagatatttttaataaatgtgcaagtctttaataaatgtgaatcaccagtggtggacattttgtccaagaattgtcctgaagaggaagacagtttggaccagctgccctgggaaactcctcaggctactttactcgagtgcagcctcgctgactgctcatgctagtgcattagaaggtggccacgaggacaggctggcgctgcctgcacggcctgcactcatacctatgctcatcggctgacctctgactcttttttttttttttttgagacggaattctgctcttgtggcccaggctggagtgtaacggcacgatcacagctcactgcaacctccgcgtcctgggttcaagtaattctcctgcctcagcctcctgagtagctgggattacaggcacccaccaccacgctcagtgaatttttgtatttttagtagagctagggtctcagcatgttggccaggcctcgaactcctgacctcaggtgatccacctgccttagcctcccaaagtgctgggattacaggtgggagccactgcacccggcctccccctaattcttatatttcagcaacatgtccctgtaggtcacttctagtagtctttgctatttaaataagcttaggagcatctgcaaacttagaaagtttcctgcctttgagataatttataaaaatatcaatgttgattctggcagaaaccccccatgtaggccctttatcccaattaatgtttttcaaacattagagtgcctgacattgtgatagatcattagccgtctctgctactttatatattttctgtatctttatccttatgcatacaaagaaacttagcaccatattccattcattctaagatgcacattagtttcacattttaacttttttatttaaaatcgggcatgtcttacagttgaatagcatcttagatttgatgacatgtgaaactagaataaatgcttagaggattaacagtggaattggaattatcccttgagtgtatgttaaaaataacctgaaaagagtttgtatttaaaagtattttcagagtttcaattatgctgactccaatttttgtatcccattcttctgaattcagtttctccttccaggaggacacctgatagtaattactccaatgaagtagtgtcagtaatgacattgtctttgtttatctgaaaaacgtttttcttttaactttactcttggacggcagtgtagctggtcttagattccaaagttgaagtccataattactttccataatttgaacatgttacttcattgattcctggctgctcttattgtggcttgccatctgctccctggccagtcgttgttaccctgtggataaactgtttgattctgtacttttaagatattctttttcatattctatcgttttactacaatgtgacttagttaattttaaaattataaataaacatattataaataaactcccttgtaatatcttcaagttttctttaaagataaacacttttggccaggcacggtggctcacgcctgtaatcccagcactttgggaggctgaggcgggcagatcatgaggtcaggagatcgggaccatcctggctaacatggtgaaaccccgtctctactaaaaatacaaaaaattagctgggcctggtggcaggcgcctgtagtcccagctactcgggaggctgaagcaggagaatggcgtgaaccctggaggcggaggttgcagtgagccaagattgcaccactgcactcagcctgggtgacagagcgagactccatctcaaaaaaaaaaaaaaaaaaaaaaagataaacacttttatttttcaagtttactttaacagctatctttaaagaaaacttgaaggtactgcagggagtttccctggaggccacacagtttcccctgtgagtatcctcttgcatcagtatgatgctgtttgttacaattagtaattggatattcatagatattttaaactgaggtccgtactttattcacattttattggctttttaaatcccatttcctgtttctgttccacgatcccatccaggagtccatgtagcatttagtccttgtgtctttttaggctcctcttcattgtaacagtttttcagcctttccttgtttctgatgatctcgacagttttgagtagggcactggtcagatattttgtaacatgtctcttcattgggatttgttggatgtttttatccaagttagaatggagtaatgtgttttggggtagacagacagcagagtattatatgttatcatatcatatccagggtgcataatatcaatatgacttactgttgctgtgggccttaatcaaatggcttaaaatggtattcgtcaggtccctcgactgcaaagttactctttttcccctatttatatactgtactctttggaaggaagtcactatgcacagcccaggaagtcactatgcacagcccaaattagggagtggaaagtagtgtttcacctccatgaaggcaaagtgtctacataaattgaaattcttcttcatggagagtttgcctccttcaccccatttatttatttaatcatttatttatgttagtgtggactcagcagtatttattttatattttggagtgtaatccagtattaccttattttgttgttcaaattgtttactgttttttaccactaggtacttgttaaatttgctgcagtatccctctggcttaacagcactggtgttattttatttttttcactcattttccttctttctggctctacagtatgttccaggttcatctggtatatttcctgcccaacacctagaatcagccctttctccagaaatcctggttccttgtattggtgaatgattagaaagcaaggtttgggtgctaggtgggttcattgccattggggcgtcatcatttctaggccctttctgacagagcaaagagttatatgtgtatatagtagttcatatatacagaaatatctgtaagtatttctgtatgtaaccgtatgtatccttattaagctaaacgtgaattcatgcttaagtctccaactctcactctaaagtgagaaaactgatttctacacatggcatccatttacttaactgttcgattgcaatatacatgtacagtagtttcagaattggtaacttacaactctgtgaggagcaacttcatcaagtagagtgcaatgctgatacacagttccttgcagaatacacccagtttcaaagttacttagaccagcacctttttctcccagtcacgtcagtaaggtcgttttatacttttgtaatgcatttgaatccttttgttacattttgtattccattctggatcaccgaatctcctaagtatttgttttgtattttgcattcattttgggttactctttgtattataaagttctatgagttttgacaatgcttaatgtcttgtattcaccattacaatatgatacagaattctctgccctagaagtactctgtgctccatttgtctactcctaacccccaccactggcaaccactgataaatttacagtctctaaagttttgccttttgtagaatgtctttttattggaatgatacaatatgtagccttttcggcctggcttctttcacttagcactgtgtatttaagaatcacctatatctttcatggcttgatagctcatttcattttatacttgaataatattccattgtgtggatgtgccatggtttgtttttccattcacctgttataagacatcctgattgcatccagtttttgtgattatgcattaggctgctataaacatgtgcaggttttctgtagatatgtgtttttgaatcattgggtaaatatctaggaatatagttgttgtatcgtatggtaacactaggtttagttttgtaagaaaccgccaaatcgtcttccaaagtggtggtaccattttgcattcttaccagcaatgaacgagccttcctgttgctccccatcctcccagcaattggtaatgtgaacttttcagattttagcctatccgataggtatatggtggtattgcattgttataatttacatgtccatgataacatgatgtgaagcatcttttaatatgtttatttgttatctgtacatcttctttggtgagttgcctgttcatatcatttggccattttttagttaggttgtttgttaatgtattgctggtttctttcctatattttgaatataagttctttatcagagatgtattttgtaaaattgtatcccagtctgtagtttttcttttcattcttgtaacagtatcttccatagagcagtttttaattttaataaagtccaacttactaattttttctttgcatggatcatcatgcctttgctgttgtatgaaaaaccataatcaccaaacccaaagtcacgtatatttaatcctgtcttttcttctagtattagaattttatattttacatctaggcttatgatccattttgatttaatttctgtgataagaataagatctatgttgaattttttagacatttattttacttggtgtctactgagcttcttggatctatgatttgtgtctgtcaatggtgttgggaagttctcagccattattctttcaactattctttctgctctgctctcgcttttggtgattcaactatatatgtgttatacctttcaaaattgttccacaatttttggataatctgttttttttttctttttgcaattcagttttggaagtttctgttgacacattatccagctcactgattccttgcttggctgtgtccaggctcctcatgaggccatcaaacgctttctttcttttttcttttgaaactttacaaggcttaaatttcatttaacttacatttttgacacaacatgttcaaattgcatacaggcattctttatttctgttacactggttttgatttctagtatttccttgcaattctttctgagagtttctgctgatgttacccaactgcttttgcatgttgtttatttttcctttagcacctttagcatatttatcacattattttaaatttcttatgtgataatttcaacatttgtatcatatctaagtcctgttctgatgtttgctttgtctctgcagactgttttttcttgtcttttaattgccttgtaatttttctgtaataaagcagaaatggtcatgacattatgaatttagataagtagctttttagtgtgcgaattcatgtgacaggtagtagttgggctttatttgatgtttgctatagctttaactgccagagccttcaggttcttctagtgttcctgtttttgtcttccctcttgatgtctgtcttccttaattaagtactctttctcagagaatctacagctttttggactgtagttcacagtagttatactggacccctgttggtggggtggtaggtggggatgaggggaagaagtgttctgtaatcctatgttacatggtagcattgtagtaggcctgtgtgtctgggctctgaccttcacaagtgtttctctagtggtatagcagtggtatagctttttcccttcttaggtaagacagaaaggctacaggctgctggagtgggaccagtgtaatttccctagcagggataagctctgagaaaccctggagagtaggcttttttgtggagaaggctctgggtgacctgtttcccagtgattacttctccccttctcttgctggagccacaaggagatcttccttgcacatttactatgagaacctggtggagtttctagacataaaacccatgaaattgtagagacctcagcaagactgtggctgtctgggggcttctcactctcattcattgctggttcacactcagcaaccagagattcactgaaattaccatttaagcattaccacaagttcatagctccagtggcttctgctttgagtgagcagattttggctgtgccctgaatttcatgtctctccatatttcagtgtggtacttaccctgcagcagcagtccctcctgagtccaataaatgtcattgatttttcatttcattcatttttttttttctgttgttatgagagtgattaattctaagctatttacatgccagagctaaaaaatgatggaggtttgaattagtctttgatttatacttatatttttgaggaactcatacttccttaatctgaggaaaagttggccaattctggaaatttctcagccattatttctttaacctttcttttatgaaactattttatacacacattgaatcttttcattgtgtccttcaagtctttcaagcattcgcattttccatctctttatctttctgagttacattttaggtcattttgttgagtctgtcttcagcttactaattatcatttctgttctttccaattcattgtttaacccacccattgagcttttatttcagttactaaatttttcattttgtaaagctcttacttttgttttcttccaaatctgcgtttttacccctagaatatcttattcttttactatgtttttgatttctgtagtgcatttaatcacgttaaacatatttattcagtattatccctctgatatttctcttgtctgtatttttgggggcttattcctcctgacttggttttctctctttcactcatggaaaatgttatactttatgtattttgtatttttgatcaggagggtataatcattgtgttttctatgcaacaattttttattattattttctttcttttgtcttttttgtggtttgctaatttgtttgttctcattgcgtctgtctgggtcctcaagttttactggtctagaacaacttctaagctaatgccatgacttgcaaagttcctaggctttgtgaattggttacatttgaattctccatcagaaagaaggctgatacattttcaggaaatagagtgtaccctgacctggttctccactttcagcccagaatgacacagactaacttgcttctttcttggccaatggtctcttcaaatttcctggaccatgctggtagaagtaggtggggggtttggttcagctctccacctacgaaagagaatcttttctatagtcccacttaggcattgtttaggctctctgtgaataacactggccactggtctccatactcctgcactctgctatggtgtcagctcacgtacttacaatgttcttttcaatttcctcttggattttgttgttgttgttgttttgaaggatttcttgtgctttcttgtgagccaaaatcagcatttaaaaagacatttgtttgattttctccagaatttccaggtgtttgtagcaggatagtattaacattatagagtctcctgttttctaggaccagaagcagggcccccatgtattatcctggcatacttaactagtttctctgtgttgtagtcaccatttcagctctagctatggcttctttgtttcacttccatttccaacttctgtaatggatgtaatctcttggtgtgtttgctctgcagacactgtgattatcttacaccgtggttatctcaggtcctgccttcatgccagtaacttaattttttagctgtgtctgttttgttcctttctgtttctcatctaactacgtaataatttgttttggttctcagtttatttgtttagctctgcaatgttccttttattctgttattttattagctcatctttgaaatcatgcttaatttgatccaagacttatatagtataatataaagaactcatgagaagcatgcccttcttatttgggcttttttccaggctactttgtatattagttgtgtgtgtatgcctggctgcctttcttctttgtgcttgttattttaaaatttttatttatgtatatatttaatcattcattcattcatactcatacttccttcttgtggctgtcattccaatttgttttcatctggcccatgcctcattcgtattttctgtgatgtagtagagatgcattatttttatgttatactttcctgattcgtggcctgatttatttttgtctttgtttcttaagccaattaacctatattatttatagaagtattagaaatatcaaataacaaaaacaaaaccaagaaaaataaatgactgcttctaaatcctgctcctaacttccattcattcatcttatccccttccctttctattggcctttggaacccactttgcaccggttccataccaagggctctgttggggtctccttatctctaactcagttccttagaggaccccaattgtgatgagatttgttgcagctagctttttgacaattcattgaaaaagcctgatattgaaattacagaaattttgtaaccaaggcatttgtgggagtctggctgtgtgtataggtgtttgcttttagtccagagagatacaacttgtaaacactcaaggaaattcctgaaaactgattcagttgggatgatggcttaaacttaaagggagatttatcctttctgttcaagggtagttcagatgaagtttgattcctgctccactcagtatgccggaaacccagcatctctcttcctctttctcctctactccacaatcttcctatcactacccattgtcagctctgctaattcaagatcgattccttctctgttagggtctgctctcatgatccaccttccaggcttcattccccaagaggtaggtcctttgagggagatagggggccctttctcatagaaggaaaggaaacctttcagttgcagtgaaaagtgcatgcttgaactcttcctccctccctgagaaggatggggcagctctgggcatgggagtccacccagcgagaaccaagtggacatcaggttgggtggggctcacctcccccgggcaagctctcttattcctgcacacacaggcagctgaacaccttggtctgccttgctcccttcaatctggcattgggcaaattggatctggatttcacaggggaaacaaaaatcagtggtgttgcccggatccaggtcctaagctcaggaaacccacctgcctctgttcacctggcatttattctccctaaaggagccaggctgatcagccagttttccatcttgtcatcatgggtctttcctgggattatgtctcaaggaatcacatgctgacctgttgggaggaaaaaaaatatgtatataaatatacatgtattacactgtggtctgattttttaaatcccttaagccttatacgttgcattgttcttgaaatcagtgttctcgaactgtgcaggattaactttggtagttaaaaatagaatcaaagagttcagaatcactctgctgggggagttctagaggcagaagtttttccaaagactgcagtctctgcctcagtggctctttggagcaacatctccaatctcaggatcttcggggtgctgtgttttaaagcataatgcatttcctctgtttgtcaggtttaacggtaccgtcagaaataagcatatatctgtaaacagttcggctgtgattaaggagctccagaatcctagaaatagtgaagttccttagcttaaccctttgccaaggtggctagctggtggatgaggccaggatccaaggcttgaaggaagtcaggttgcacacactttttgaaaagattctcatctgcacattgatgcatcgcagaataaccatgaacccactgggaatattaaatgctgacctctagacacttaattcctaagccttaattttcagtgggaaccaaaccaaccaggtttcaaagatgagccaataaaataacagaataaaaggaacattgcagagctaaatgaataaactgagaatcaaaacaaattattacacagttaaattagaaacagaaaaccaaccagtaattatgtgccacccctaaaaataggcagccgcagatagtgaggagatattgccagttcgggccaattctcttagccttttcagtacctttctatcaaaggaacttttttccgataatttaacagtggagaattttgctatattttaggcacttttctttttctttttcttttttttttttgagacagagtcttactctgtcgcccaggctggagtgcagtggcacgatctcagctcactgcaagctccgcctcccaggttcgtgccattctcctgcctcagcctcccaagtagctgggactgcaggtgcctgccaccgcgcctggctaattttttgtatttttattagagacggggtttcaccatggtcttgatctcctggcctcgtgatctgcctgcctcggcctcccaaagtgctggaattacaggcgtgagccaccgcacccagctcttaggcacttttcttcctgctacctattcagtccttgcagcatgctgcagagagagcaattgatagccattacccttgtttttacaaataagggaactgagtctcagaaaagttcaggggatgggactacccctagcccacatggctagtgaatagcagagcccagagcctgtgatatctatagttttcacattgtgtccccaacaaacagaccctgagcaatcccaaaatgtgagcagaggtagagccgagctctgtatcccgagagggccaggccctgtggtacgaggaccaggatggtcctagaaatgccaagctccccatcagcagctctcagacatccaggcttcaggactccgttgctctccttaacgttattgaagatcctctaagttttgtttatgtgattatatctatcaatatttaacacattggagataaaactaagaagcattttaaagttcagtaattcacttaatataataaggccattccataaatagcaagatgttaacataaatagcattttatggaaaataaccatatcttcacccaagaaatcagtgggaagggtggcgttgctttttattgttgcaaatctccttaatgcctcatgtaatagaagacatctggactctctgaccagcttctgcattcagtctgctgctggtccctatgtcctgtagcctccgcaaacctctatggaagactcaagggaaaagggggatgaaagagggaaataacgtctaaccattatgaaaaaaagatttgactcactggtcctctgaaagcatttcagaaacccaggggttccaagcccatactttgaaaacttctgtcttgtacaattaccaaagggaattattttccgtgatcgtaatcacagtgtttgctgttacaacaaggaggacagaatcacatcatggttcaaaacacaagtgttgaaaactaaactttatgaaactgaaatccaaccccctaacctcttaaacaggtttctgtacttagctgtgtgacctagggccaggagcttgtttgtttcataattgatatatttatgcattcctcttctcctttgattataaaggtaatacctgctcatagcaaagcattcaaacagaaaagagacatataaaattaaatttggggggtctcccataatctccattattaaatgagaaaaataatagtatttattttgctggattattgtcgtgaagccaaaatgcgttgtttgcgtgtgcatgtgacatttagaaatgcaaactctgtttaagggttagctttgttattttcaggtatcgtcaatacctgatacctgatatttattgatatcctcttggtaaagtacttgttcatcttttgcccatttttctattggattgcctgcccttttctgattgattttttggagtttatttcttattctggatatgagtcttttgtcagacctactatcttgctgactcagggaaaacctcagtttgttatgctgtaaaactaagaaaaaaatatggttggtgtaaagattaaattagataaaagaagtcaccgtttataaactttagactgctacacaaatatgaatttatattatccagctattttctctgcaaacaagaatttagaaatggtggtggttaggtctattgttatgtttttgcttttttttttttctcagcatctacacaaaggaaaaagaaataatgtgatgggagctctgtaaaatcacatggaatgatgttacccagtaattcacgaaagaataattgctgcagaaatgcaagatagcacattacgcattaccacgacagttgtactctaaaccagatagacgattattcagagagattgattttaaaaagcacgatcacttaaatcaaagcatgctctcaactgaagagctcagatggaaaaagaatgaagggagttaggcgcgttgactcgagggtgccttgccacaccggccttctgggattctgtggcgggctggggaccctgcctcctcctgtcttcatcccagagggagaggggagtgtagatcttgcaggagagccgtgtgtgtgagtagccacgtggtgacagccattggcactgagtgacatcgcacagattgcagcatgctcctcctcttcccacctgctgtagcagacagggcagctgtttgcatccctgtttcggaggagagaacattgaaatgcacagaagccaattgcctgctgagtcgggagcccccagggtcttttgcctgtgtggactctgctcctccatgccctcctgcccagttggggagggcaggaatagccaggggggcagcttgaggatctggaattgctgaaacccactttcacagtgcaatggtctgaatgtttttttcccccactaaatgcatatgttgagatctgaatccccaaggcgatggtattaggaggtgattagtccatgacggtgcagtcatgatggatggtccccatatatacaaggccccagagacctcccgcgccccttccaccatgcgaggacacagtgaaaggtggctgcctatgatccgggaagccagcccccaccagacaccagggttcaaccatagtggcaggttaatcatggacttccagccgccagaactgtgagaaacaaacttctattttttataagctacccagtgtatgatattttgttataagcgtccaaatggaattaaacatagagtctgtgctacttaattgcaggcccctaggttcctgtggaatactgttcttcgggagactaaatgtgcatatttattcacaggcctctgggccagggttggatgtttctgtcccctctcttgcaggaacccccttgtttgactcgggtggcctccaacttgggagggagtgactgctgtaggcagctctgcctgctgattcatggtttcaggctcaagtgctgcatggcaggctgggggctctggcagcagtgaaggatatttgggtgaaagagaaggaaacttccctcctggggtgaggaactggattttgtccctaggtaaattctgggcagtgggagtggagcccctgcatacctgccctgaatgtccttctgccgggggccagagggccatgtgggaactataattccatctggggactttccacactcagaggtgtggccaccatccccaggtctcccagttcacctgcagcctgtgtggccaagtacaaatcccgaggcaaggaagttgagtgcagagctgaagtcctcccccaggtcctctgtgcagaagcctgtcaggaagcagggggctgagctcagctttagtgcagcagggtcgggacgtgcttgccaaggatcgaggaaggaaaaggctgtggggaaaggggaggggacagatggactctgaacctgcttttggagcagcctctggggagggagggcttttcttgccagccggtcaaggtcttataggagaagacacggcacctgcagacctattgctgccagagtcccacagaacctctttgagaagggggaaaggggtcagtcaagagccattttgcaaatgaggagactgagtcctgcagcaactgcctctcatctgtggtcacaggcgtgggggcctggagacagtaatgcctggatagagccttggaaagcagagctggtggtgggaaccgagggataaaggctcaggactgggtgcacatggtggatgtgaggggatccacatactgtggtattgcaggatcacaggtggttaaagcagaggctcagccccaggacgccaccccttgtcactctgggtgaagtccatgtccttgtcttcctccttgtagggaccctgttttccctccctccgtgatccttgttaccatttgttgttatatgttgttataagtgtatcattattgtgttgtagaatcctacctcatccccccccaccaacacacacacacacacacacacacacacacacacacactttttattctaggagctcaggagcaatattaatttccactgcacacatcaggcaagcataatgctggggacaggaggtgttccataaatgttgcatgaacgaatgaatgaaaactcggctggaccatggcttgtagcaatggcttgtgcacttcactcaagattcttgacttgatcctttgggcagtgcagttggaggagggtgatctgatcatatggatggtcagaaagtccggtgtgaagatgagtagaggacagcctctgtgtgtgtgcacctgcgtgtgcataggggcagcaggctgcacagtgggaatgggaaggaggtgagggaccttgtcactgcaaacagagagccaagagactcagaccgtgtgtggcccggacaggtgccaagaggagggagattgttctgggagcatggttcctcatgccctcctctctccctcttgagtctttgtggggggttcccctaacgggtatccctgcatgctcaggtggtggtggctgctgcttgttgattacagtttgaaaagctgcacttggtcccaagttgccacacaccactgaaattcagtgttctctaatggggtttctgttagaatgttggaaggaagaaagccttttaattagattcgtagtaattgagctcccaaaccacagaagcctttctctcagcagatgaagacacaaatgcaattaaaagaaggaaaggcacctaaatggaacccttgctaattttaagtccattaaaaacaacaactccttaataagttgaggcaacagatacacgttctgaagagttttaacagtgcttcccaataatattggagcttgaactggaactggagtgctccagccacttaaatggatagctctgttggggatcatttgctcagtgcagagtacagagacatgttagctctacagcttttcccaccaaaaactcctggcacattttattaggaaaatgggatatattttttcctgtaactgaataaatgttcagcatcttgtggacattgcctctggcctggggtcccctgagacatcatcccatgtccctccccaggcagccctctcctctctgtgggatttgccccacctggcccatctcaccccagaggtgcccaacatgtgagcaactgggctggggcactgatgtccctgtcaactgcttacatgctgaacgcattttcattttaatgagaggcagcattcgtttttcatttgcatccctgctcactgacatgccccagcagatgccacgttctttctgcctttgggtctttttttttttgaaacttcccatcggtgaaccaggccaagtagattctattgcgggagcttgaggtttcagcttctgggaacatcttcacaggggcattaattaatattttccctggagagggtgtcaattgctaattcacagagtcctttacgttggagttgattatttcatgctgaatcacaacattctcagtatgactattgtacagaattcactcatttgcctcctttcactgggcttggtcagccgtactaaaacgcaagttgcctcccatttggaaaggccagtcttgacgggtctcttctctgtacgtcctgtgctggagcaaagtcacagctggtacactagccaagctccctgattagtgcataggcttagctggaggcagaactcagggaggtgttttggaaatgtaggaaaataagctctggagtcagaaagatccaagtttgaatggctgcttctaaagtcacctcatctttctcacctttagtttatcacctgggtaggctttaccttcaggtgtatttcaagagcccgatgtgcctcctagaagttagaggttgagagaaaagcccagatctgcagggacaaggcagagtcatggccctcatggcaccactcacacagggtgcagcagctccacacagggccatggcccctttcctgggggagggaggcataacatacttgtatttgtttaaaagcatatatattttggaaacaaacctgactttaaaaacttgtattttcacctacttttatgtttttttttaagcatatgaattatttaaaaatacaaagataaatagctaaatcattagcaggcatcatttctggatggtaaggttgcagagttttaattttcttctttatacttttccatcttttttaagtgctgtataataaatgtgtcttactttggaataaatagaaaagcttaactctagggaaatgctgcttgcatatattggaagtgcttggtgcattctaatttccacacacaacaacgctctcgacagtcagatccccatgtgaataattgtctcattctttcttttgtaaaccatattatttatgctgctgctttttttttttttttgaaggatgagaagaaccaagttttaaccaccaacatttggctgcaaatggtaagttaagagaatgacaatctctcccatgggctgcaagatcttgcacccaagattcttgttctgatacctgagatgcttgcttctgagaggtcctgtttaggaaaaaaaaccaaaaaaacaaaaggccatggctgtcacaccaactccacacctgccaacaatgaatgctggctgtatgacactacagtctgcagtgctcaacacatgcacaagatcaacacataggacaaggtaatgtggggacacttcagaagcacttcaggcaagacaagaagatacagggctgtgtgtagatgtccacaacctgcaccacagccagtccccaggactcagaagctccatccctgccctctgtggcctccggagctgcatgtttgaatcaggtggagtgttccgaaaccagaggccctcgtactttgtgctctagcaatgcttataagaatcttgaaatgctacctatcatttgtagatttttaacttgacatctgcaatactaatctaaatttgattaattgcaaatgatgccacttaacatccaattgtaaatattaacactgaaaaatgaaacagtcagtctctattttaaatggaattcaaaataccataataatttggtgcccatctcattcaaacaccatatgaacaagcctttttttaaactgtcagatatttaacgtagtcccttttttctctttgcacatgcatttctattctagtttctatacggaattttatcctaatgtaatataattttatgtttgaaagtctcttttttgtttgtttgtttgtttgttcgtttgtttgtttgagacagagccttgttctgtcatccaggctggagtgcagtgcagtggcgcaatcttggcttactgcaacctccgccttccaggttcaagtgattctcctgcctcagactcccgaacagctggaattacaggcaggcaccaccacacccggctagtttttgtattttttagtagagacagggtttcttcatgttggccaggctggtcttgaactcctgacttcaggtgatccacccacctcggcctcccaaagtgctgggattacaggcatgagccaccgtgcagggccgaaagtcttttattaatcgtgccttggttttttcaaatgtaaatatttacacaagaattattcctttacaccgtaagtattaaattttgtttcttttggattgatttaagtttgctattgttattggtattataattcatcaaggtgacataaattaaaatttttaagtaattataaaacataaatttttattggcaatttatatctctgcccaagatgagtttgttttaaattagttcatgtatccacagatgactttttattacttgaatggagagaatgatagttttcacttcaattctgttgctgttttttaactaggtgtagtaacatgagtagttggacatgaaagccactttgttaaagcaatgttactcaatctttgaacttcttctaggttatatgccaaaaataatgtagtttttatcaaatgtatcagctgacagcttgattagtttctccttcaattttgttgaaaacaaagaaaagaatttaaacccacctgacctttgaaagtatttgccacccaatttgtaaggtaattcacacagacacaaacgctgatacttgaattgaccatttgtttggttcttgagtcagtgtcccaagatgggagttgaggtaagataagagaaatgtgcccttctttataaagttgaatgggagaagtgaaaatggaggcaaaggatagtcccatgtggttcttgggcagttgagttatcctgcgaatacacgtggagttgagggatagaaaatggatctgcatccagcctggccaacatggtgcaaccctgtctctactaaaaatacaaaacttagctgggtgtggtggtgcacacctgtaatcccagctactcaggaggctgagccaggagaatcacttgaacctgggaggcagaggttgcagtgagctgagattgcaccactgcactacagcctggggaacagagcaagactcaatctcaagaaaaaaaaaaaaaagaaagaaaaagaaaatggatgtgcttaaagccattgctaggtctccaaggtgcacccatagctacatgtgagactcctgcagaacctaacattagtcaggtgagagcccttgagatattcccttgcaggatttaaagcagcatacttcagtgagcatatcccttgccacctactctagcttccctccttttgcccaggacacatgatctgtgctctcctggaaggcccaggccttcttcccatggacagactcatctcctggcccctgctgagagcctggcattaatgattgtcctcgctgccagtagcatcaaaatagtgtccgtgggtcattctcactcttgtctctcccacagacttttcatttggataaatgttaaagccatggatccattggctcaaaccaaaaaccttgaagtcacccttaactcttgtctcgcacaccacctctgatacatcaacaaatcctggcagcttgacctgcaaaaccgatccaggatctaactactgggcatcaaccatgatgctttcaccctggtctacatgggtgtcatctctcacctccattattaggagtccccatccagccttcctgcttcagtgttgcctcttctggtggtgtcttgtcctcaacatagcagccagcatataccttcttggcacagatccctccaggggctcctgtctccctggacagcataggaactgaagtcctcgaagtggccttggattcaattccctccttgcctggctcctttttcctctcccctcccctctgttctttgtttcctggctgcactcactgtccacttgttgggtgacacacacgtcacccgagcccgtgccccccgctcagggcctttgcactggctgctctccctgccaggaagactcgtccctaagaaccacttgatttcccccttacttctcactgatctcttcctaaaggtcaactcttcattgagtcttctttgagctccgatgtactgtcccaaaccctcccctccacctccagcccactctgttctctttatcctgtttcatttttctcccaaaggcttctcaccatgtaacccgctttgtgttcactcgtctatctgttcattggttctgagtcttcatcacccttagaatgtgtgcacagtgtgggggacagggctccaggtgcattcggtcactgccgtacccacagcccctagttcactgtctcacctgtagcgagcaccaaagaacttttgccgaatgagagaatgaagcaaaaactcaaggtgaaccttgaggtgcttgggtagcgtgacacaacataaagccatctcctgaatggccgtgcagcactttcgtactgtgtgtataaggccaggctccggagaatgaggcaagtgcttccctttttaattaaagttggacgtttgccatgccctctaaggaacaacgctgctgttgacatttttcttacagagagaaatgcatgttatggagaggtctctctccctggtgcctatcttccttagccctcagtaagtgactggtcttcagcaatgtatatgatttggcaattttatttaaaggatggtggtttccaagaaaaatgtaactggattattacttccagtatggaattcagatgctccacaaataaacatccttgcttcagagggtgtcaccagagacctctaaatttatttcaagcacagctaattttaattaaggcttacatttgcagaagcatctgcagcttcatttgtttgaaaactcaccttttaactcacctcctcttggagcaacctactctgtggaaggtattaaactgggccaggtgaggggacccagaaatacataacccagtttctacctttaagccatttatgatcaggctgtgtaattaacacgtttagaagaaggaggcggaggagaagaagaaggaaaagaggaggagaaggaggaggaggaaaaaaggaggaaaaatgaaggaggagttggaggaggtggaggaggaaaaggaaaagaggcggaggagaaggaggaagaggaggaggaagaggaggagaggaggaaaggaggaggagaggaggaaaggaggaggaggaggaggaaaagaggaggaggaggaaattaaaatagcaagaacaagtatctccccagggatattacagatgacagctggtggtcagatagtagaggccagacgtgggagaaatctctgctttaaagaaatgggagagaaggagaggcacaaattctcctaaacgtgaagatctgggagcactggcatttctgagtattttgtcattaatgtttacttttaggtgcctaccgattgagaaacatgctggattcccttagaaggtgtgccctcataaagctgggtgataacatttatctggaaagcggcacctgtagatgatctagcagttgtaacactgtctcccaactgaatttttaagggctcacaagaatcctgggtttaaaacaaaccttaacagtcatctagccagtgcctgtgtctctctgctccccgcccccacccagtgtttcagtctggaagccctggcatttctattcatgtccacagcatggacatgaggaactcaggagtcaccagagcaagcttggatgctgcccagaggccacttctaagcaaccttccattgattgctgttcttgtgttccctggctggggaccagcctggcttgacccagcacgataatggacatgcacaagtgaagctgggtactgaaggctctcagggccagggttctgaggggggtgcaaatgtgggccgggggcagagagccataaaaacggctctagcaatgggtttttctcctcccgagtttcatgttgctgaattcctgtccagaaaatctgaatccacataatcttttctctagggtatttaaactctgcaaatgatacattttctgtttattaaaaatggaaaaggcagaaaggtaaaaaaaagaaaaaaactctccttgacctccagtttgttggttttgttattctttctcccagttgcccttgattttgatcattcagaaacgtgagggaggagaaagaggcttcatctctctgttcacctcttcatgttccgaggaggaagcagctggttcctctgcagccggttcctctgcagccagttttctctgcagattagtttttatcattttgagagggttgtcagacataatctgatttaatctatgagaaaaaaatgacagaagccatttcagtttctgaagagacatttgaaccatccagagacttacatttgcttttaaaacacctgtcttctgtcattttgcaattgtgaccattctcctggcatttgatgtcccagccttcctgggtccttctctaactttaacctcctaattctaattatggtactaatagcattcacaccatagatgataagattttaagctgttattttttctaaaatatttacctttttaatttctgcattcatcatcacttgatctctgacacatggaaatgccacgcttcctgtttacagacaagccggctagtggcttgcttagggctgtgatggcatctcaaggtgaagagcgatgtgtcaatcattatgtctcaccaagagaagaaagcgtcagggtcagtggggtggaaaggctgctttcctccactaacaaaataatggacgggaataattttgaaaagataagtgttttctgacatcaaacgtgtgatgacttttctagcaccaacaaccaattttccaccagcaactgggggtccaccaattcaattcatttctcacattatctacctggagttgcatcagatcccacaggttaaagggctcagtctcacttcagataccagctgcaaatggtgtacccaggctacccacatgtctagcaggtgactgaaaattcgagggttcccatacccttctcccccaggttcaataactttctaagatgactgacagagctcaggaaaatactttgcttacttaataaaattttaaataatatacaaacttatttaatatatttataaataaaatatatttattaaataaatatttaatatctacttatataaaataccctggagaaaagattacatggattcagagtttcagaacaggaattcagcaacatgaaactcgggaagagaaaaacccatgacttaggtttattggcttattctaaaggatgcagctcaggaaccaagtggaaggacgcagcggacagggcgtcgtggccgcaagggtgcgcggagctgttgtcgtaacttctcgccagtggccaccttccctgcaagtggatgtgctgaccaagagtgtttataaccccgtctcgagcccctttctcacccctccccagagctgtgagtgcaatgggcagaaagctctttactccagtcactaggtgaccagcccccatgaaagctatctaggtgcccaaccctaagtcacctcatcagcgtaaactcaggcctcaggcatggtcagaaggggctctgtatgaatcacaaaagacactcctctcactcaggaaattcccagggctttggaagctctgtgccaggaaaaccaaatctattttcttattataccataatgtatttttttaatgaaagataactttcctttttcctccctcccttcccctctctcatccctttcccctcctccgccctccctcaatgcttccatgccactagcatccacacacatttagagtttcctgtgggctcgaagcagcacaaatagggcccaggtgccagagccatggaagaattgggattcccccagtgccttttagatcaatggccccttcctcccttcccttcagtgtcccctcacaactccacacactcttcttttgaagatttaatgagaaggaatctcacaaaaggagggagagaaggaagagcacacactcctctaaatgtgattgtctgggagtctaggttcattgacgcttcttttcagatccccactctgtggaaaacgtgtcaggtgctgtctacaaagattttgtctgatgccccctgttcccgagggacctaggaaccaagtgctttcagagaacaaccttttttctagaagtttgttgtttgtagggccttattccatatccattcttgggaaaccgtcatgggagcctgtgggggttgctggtggggcccccgggctcaggattgtggacctgggctccagggcacacagcatgaggttcccactgcatgttggcactcagtcttccccacccttggctgcagctatgttatgactgttactacagctcccaagtccagcaggattttgtaaaatggggaaatctctctctctttttttaagccaccattcatcacttgcctgccagggccatatgactttaatctgctgctgcacacattatctcatctcatcctgtgaggcagggtacatgtaaggaaactgcagttcagagacaatgatttacctgaacaagctcacgccgctagtctctgccagacccttggtgcaaacccaggtctgtctgatgcggatgcttttggcagctccccctaccttttctgccactacggttacctgaaaagggttccgatccagaccccaagagagggttcttggatctagtgtgagaaagaattcagggcgtgaaagtaagtttattaggaaagtagaggaataaaagaatggctactccatagagagagcagccccgaaggctgctggttgcccatttttatggttatttcttgataggctgaacaaggggtggattattcatgcctctcttttttagaccatgtaaggtaacttcctgatgttgccttggcatttctaaactgtcatggagctggtgggagtgtagccatgaggatgaccagaggtcactctcgtggccatcttggttttggtgggattcagccggcttctttactgcaacctgttttatcagcaaggtctttatggcctgtatcttgtgccaacttcctgtctcatcctgtgacttagaatgcctaaccatctgggaatgcagcccagtaggaggtttcagccctgctttacccagctcctatttaagatggagtttccctggtttaaatgcctctgacacaatggtcagcctggtttggggcaagggaaaacagcagatgggcagcagcatcagggagattgagccagaagaaccagctctggtagaacccaaagatcagtttgcttaaagtcaaataacacaggtaagccctgacccagtgactgactaaaacatcctagctttctgaaccctggcgtcctcttgtaaatggaagcagtcatatcactgacccccccgaactatggtgagtctgctatggtgagtctggacatacacaggacactggactagcataaaggctgtgatctggccggggaggggatgagcccgtggtttacgcagtggggtgtgcggggtgtggggaggcagcgtacagctctggctgtgccttggacgaggtctgggtttgaccatccaagcactcccattcccattcccagttcctgtctcccctccctctctggccatcattcagcaggcagaggagaaggagagaagtgccttggcctaccatgcccactttccagggcagttcgtggaatcttggggccctgacctgtgtggtaataatggtgaacgtgactggctctgtgataattagtgaccgacacagagaagcatcccagggtgagatgcaagactgtggcacagaaagcacaggtgttggctgtggcagggccttgtgcccagggcaagggagagaaatgaagggaagcacagggcagaggtgccaagttggagcaagctgcaggaagcatggcttggttggtgcccaggcattcctggaagacaactaggacaagacccaccattcctgggtgtgcccctcctgtcccctccccaaccacttccatctcattagagaccccagcaggcagctgtcgatcctgaatgccccagaggatacttctgcacatcacccattaacacatcctcattcctggaggtccctggctgcaaaatgatgtcactcacctggatagttcctctcctttgatgtcagattagatccttccagacttgggaccatctttctggatgctgcctgccctcctcagagaatggttggtctgggacatgccctttgcttcccttgttgtatcaatagctctaggcccacagcccctcatctgcaattcccaaatctcagcagctctgaaaatttttccccctcctttgatgttgttttcgtaactttgcgtcaaattattttggtctaaaatcaaattgaaatctatgtgaattgaggcatttatttgtctcacttagtgcaaataggcatgttttgctgcagaaattaccatgtatttgattgtgaggagccaccctggtcccaggttggggtggtgcatcacatacctttctggatcttggaaagcctgagcttcagagcatgggtggtaccagggggacagaatacaggataatggtgcaattataggagcttctgggctcatacttgtcagccctgagcctcctgtggggtggtgctggttatgtggcagctgcaggtgggatcccacccgagcatcctctgcagagcttgtgggctccaggaagggctgtttagcacctgatcctcggagggatgaccccagacgtgggtattcctctggcaaaagtcactcgataacctcaattaaggcctggccgtgagcttgtgtgagtgcttcctgagtcttcacctgcctcctttcgtcctgactctgcgtttcaccatcagggctcaggatttgcattgtcgggtgtcggaagcactatccctgtgacaaaataaaaattcaaatctgaaaacattcctttagaaattctgagaggttcccatgcagctgcacagtattgctttatggaaataaatattccacatttctccagcctggttcttagtccagtggaaataagtgaattccttttttcgaagtattcttacagtgaaaacttctaaggcaaaacagttattcatttggctagaagtaacccatctactgcaggaggagaaggctcggggacatgcagagggttggaattaactttaatgataccatctgaatgtgttcatggtgacagcagaaccttaaatgtgagttttatgctcttcacagtcattttggaaaggatttttgaattcccattttcattatattttataaatagcaattcagttataataaatgtctggaattctctttggttttgcacttacctaataatcgcttatgagaaatattagtagccaaggaagtgaagtgctgctaatgtcattgtgtgtgtcagtcttggacagatcactatttacagtggaatgtgtcagaatatccaggggtgaagactgttcgtttcccagatggccagatttggaaaccagacattcttctctataacaggtaagcatattgaacaaaggaaaaaaatgattttatgcttgcatacatgtagctatcacgtatatttgaatatttcacagagatgctggatatgttatctatgatctggggccactgctccctacacggctttccgagcggccaggcctttgagaagcagctctgtccctgtaagccagcattccctggtttggcatgcacacgtgcacacgctggctagcctgctacttaagacgcccatgaagttgtatgttctcggggcctagtgttgtttctgtgcatattggcacatggagtattcttgcataaggcagtacctttgttctctgaatggcagcagttatgaccaacagcaggaagtgctggcctatgggatgcactgctggagcccacagtttggacccacatcctcgtctatgttccctgttgtgcattggagagttctgtggcagagatggctgcaggtgagcgtgaggactgtcatctctagctgcatgcagaaacttcccctgcagggtatatacctgatttctaatagtctttctcctgaggtcaggaaataagggacacgtcggtaaaccaagacagtctgacttgcagaccagatgcctaaaaggcaattattcaggcagggtaagtttctagaagcagtaaaatttctcgttaaactgcatagtcaaataagggatcccagaacatttctgactaataaggtgtcagacctcataaataacatcatgaaaagaaagttatttcctaatcatgaccgctacctttggtcatgaagaaggaagcccaggctttcctgatgcagggaacagtgtgaccaaattgccctccatggtcactcggtgatcccgctggacaagcaatgtgttgtcctacatggctacttccagaaggctgggcgatgctatttcttgtatggacttttcattctgcctctgtctttgcatctgggggccggccacatttcacttgaatcattgggcccgtttctagaagagtatcctcttctcatttgctgccacttttctgcttctcaaattagttcagacaactgagctttgaaaaacgtctaaaataggagtaagtggtcccctgttgaatggatcaaacatgtgcctttccatgcctggactttgggtcttctgtttcttggggggctgtattagtttgccaaggctgctgtaacaaagtgctacagactcagagccttaaacaatagaagttaccctgtcacaattgtggaggccagaagtctgaatgaaggtgttgtcaggactggcttcttctgagcctctctccttggctggtagatggctgccatctcactgggttcacgtgaccttcgcttgtctctgtccgtgccctagtctcctcttcctgtaagcactgcagtcaaattagagtagggccccatgctcatgaccctcttttactttaattacctttttaaaggttctgtcttcaaatagagccacactctgaggcaccaggtattaggatttcaacatgtgagtttgagggagatgcaactcagtccataatgagggcattgtatctgactttttgagggcaaagggtcagggttgaagaagtctccgtgttaattttagctgtaatatttacagtctgtataacctttgagtctcagatttctcctttgaaaaacggggaaagtgccggcttcacagagttcggaggatcgctctgtggatgtgtgtagcacacttagtctggcacttggaaaagagcacacattccgtaaaggcagttgtgtgtttacaggcagaatgatgaggattcctgcttttagaacaagatggtaatttaacaatttagaaaaaaataatcaatgtttttcattttccaattcggattttttaagtttgaaatcaagaataaattttataacattcagcctgagcaatgtacgagacccccatctctaacaacaataacgacaacaacaacaaaattagctgggcatggtgacctgcacctgtagtgccagctactcaggaggctgaggtagaaggatcccttgagcccagcagtgagctttgattatatcactgcttgccatcctgggtgacagagtgagatgctatctccaaatatatatatatatatatatatatgtatatatatatatatacatatatatatatatacacatacatacatacacacacacatatacacacacacatacatacatatacatacacacacacacacagagagagagagagagagcaccccaccatattatatgtataacatgttggtggaatcttattaacacggttacaagaggcagtttatatggcctatgtgtaggatctttaactccaaaatgtaaaatgtttgatgattccaaatgctctggctaatgaggaatttccaagttgtaattgaatttcaaggagcaaagatagagcagtctctacctgacaaatgttaccagggtccaggcccttagaaatgatccccacctccacatgcctgacccagctgccggtgcagaaccccatcgctcacacatctgttgagctctactgaaggatcctgctcgttcctctttcccatggtggacatagaccacgtccgccaggcttcatcatggaggatgtagaggctgcttcaatttctgcttttgttttcctgagacatggaatgtaggactttctttttgaagtaactactaaatatattttgaagtaactgctaaatatatggcccgcaggtccacatgaacccaacgtggaatgaatagatttcagagaatatttaaaccactcatagacacttatctattgctacagaacaaactcctcagaactgagtgacttaaagcaaacaactcagattattcctcatgatgccgtgggctgtccaggcccatgtggctggttgtctctttcacgtggcattgggcacagccatgggctggggctccactgggccgatgtgctgaggggtacacttccacagcggggcaggtctgggctgagctggtggggacgccggccctggcaggaagctcagccattcagctggggactgtgcacccaccccttctgggccttttccacaaggctcggtgtcccccagcttggtggccagcagtgctctgacaggaaggaaggagaggctgctgggactcttaaggactgagcgtgagggtcccgcaacagcccttctccacattctgttggtcagagtaggcaggagcccagcttggagtcaagaaaggggaaatcagcacccctatctagggcaagagggaggccacagggtgctctggggacactagtgatcacagctaaggaaggaaagcggtggaactgcaagggtcaaagtaaagccccaggaaaccgaaagaccagaagaggcgtgcattgtgaaggggaaggcacgctccgccatgtgcctgctgaaattggcaatgtgggaggagaagcaggcaggaggagagagcttctaaacaagacagatcttgtcatctctgcccccccttgctggctggcttccccttcctgcctggacacactgtgcagcccccaggtatgtgctgaccagcctatccctaccctgtagcctcgtccactctccagccctactgcttgtcctttggctcattgatgcaccaatgcttccaggcagagtgtttatatgagcgtcttgcggggcgaggaatgcccaccccttaactcccagttagcaagggaaacctccctgacaccctcacccctgccaagtctagaacacatttctctgtcacgtagaaaaggattcctgtccacgatggcacttagggtctgctacctcttaggggcacctagcagggcacttgatacacatttatgcaaagacaagatggagagaggaagggagggtgcaggaattattaggaggaggagcgaagaagatggatcagtgtaatacagtgcggctaagaacagccagagaagaaagaaagcaaaggaaagaaatcatgtaggcaacctagaaaacattcaactgagactgagtccaaaaattcacacaggaaatagcaaaaatagtcttcactactaatatcctaaccctctgatattctgttattggggattttgagagataccgaatttaatgctttctgccagcttctaggcgtggaaaataatatgttctgcttagtagactcatctgttagttcattatggtctgaatggagtcgaggggcttttcctaaaggagggggttaaatgcatcctgtgtaagccccagttttgaaagcagtgttgatgtagctcagctgaagcctcccaaacatgtctgtcctatttctcactctattctcgtttgatattggagtccccacgtgagtcactattgctttttgagatataatgcattttccatgctttaaagtggctgggtcactgcaaaacagccatctctgcatcatttgtggaatgggctgctgtatttccttgatgggtgggtaacaagtcatgctgctgccagccagctggccaggtcgctctgaggagaggatgggcacgaataaaagcgtctctgtctggtgctgatcccagtcatttctttgttgctttattttgctttactttaagcctgcggctcaaggagttttctgaacaccatcttgcctaaagtgggtagcaattatggatggcttgccgtgattttcccctttggatggaattaaaggccttgctgggatcagcagtccgcttgcagaaggacagtctgaatcccgcaactctgcggatgcccctacaccgtgcagagacaggcaactgcctcaccctctctgggcttctctgtttctgagttgctcggtcagaaaattctattgcaataatggaaatcttttttgatgaagatatttaaagatgtttttgttggctctgaaagtttagaacagcatggggtttcagccatccattttcattgagtgtgcaaagctgcatttgtcatctgcagggttgtgtctttcactcattttcctgaccctgtggctgatagcagaggctggagaggggacctctatgcaggacacacttgagagcagtgtggccaagcctgtaagcactcataattgtgctcatcattgttgccaagcgtcttagggaacctgggggagccaacccaggacaaggattcctgagcatgtagcttatttgggaagggatcctgggaagcaggatgaggggagggggagtgagatagggagggcaggcaagccgttggagtgagcattgaaaagcaaatcatactgcgggcaaacagagcccattcctactggggagctctgggagactgtgtatagcacatctcagccttgttctgaggaaactgggatgcttatctgccagctgccttccatcataggctgagagctgcttccaggggtgtcagctccctggcacctctggcttgcctgccccatgtgtggatcaagtgcagagctgcagatgcttgcagtaggcagctgtcagggccttgggcacaggaggatgattgtcgacatggtctgctacagcgcagatgagccatccactcaagttctagttgctttcaccctgctttgattgtagatccaatctcagcttctggtagggagcatagcaacaatatgggtggaagggagagagtcctaggacttgagggtcctaggggtgagggtgttctcagccagagcagaggaggcaggcaggtggcaaatttcactggactaaagaagagcccaagcctgcatcccagcaaggggtgcctattctacgtgggctgcgatgtatctattatggagtcatggcagtgcacacatggaatggcatcttagggagtgaatctgtgagatgtagtgttgtcatggttaatagctcctgaaattgtggtatccctcagcctaaccgagattggcctgctggtgctcaaaggctcataatgcagtcatggccaggctcttggagggcccaagggcatcactggaaggtgatgtggttgctatagtttgaatatttgtcctttacaaatatttgaatatctgtcttctccagaatttgtgttaaaatttaacccctaatatgacagtattgagaggtgggacctttgaaggccaactgggtcatgagggctctgccctcatgaatgctttaatctattcatggattaatggatcaataggatatcatgggaatgggactgataacttgataagaagaggaagagaggcctgagccagcaccttcaggcccctccccatgcgatgcctggtaccaccttggcactacagagagtccccaccagcaagaagccctcaccagatgcagctccttgacctcggactcccagcatccatactgtaagaaatgaattcttttctttataaattacccagtttcaggcatcctgttataagcaacagaaaacaaactaagacagtagtagttccaggtgagcagaggtaattttgctgctggagatctcagagaaggagttttgaggatgtgctgttacagcttctgtattaatcagatattcacacctgagctggagggaggctgtttctaaatcatgtgttgtgggaagagggggagcagcagcttgttttaaagcagtgagtggagccagccaacctatgtttgcatcttcaaagtcatcctccgaactgtccatctcactctcccaggtctcatcatggtcgctcttgctgtttgtttttaatttgttcattcactcaaccaatatttagtgaaggctccctcagcataatcacacactgttctgggaactaaggattcagcagtgatccagccagacccaaacccaccagagaaacagagatggggaagagaggagggaggcatgggccagattgtaggtgatcccagaaaaatgaagcaggaaagggaatagtgagggctgagccagaggtcagggagagaccaggagacagactagagggctgcaaaggaacaggccctgtgatatcaagtggagagagtgttcctgacagaaggaacagccagtgcaggggccctgtcaagaaggcttgtgaaagacttcgaaatgcaaaaaaaaaaaaaaaatagtgagggaagagaaaaaaagacacctcggttcctacagaatactaggcatggtcacaggcaccttcctggtcatctgagtctgtagtggactgtgcctgtcatggtcttcaaactagttttcaactctaacttctagaaaactgatggcaaaaccaatgattctagtccacggagaagcaaatgtgttttgctggtggaccaattcccctgttgacagattcagatcagtgtgcctggttgtctttgtatgtgtctgcttttaggatgctctgcagaattggttttaacattttcctggttccttccttcattaatgacttaagtagtctttgacacacgatcactttatatttgtgcaagtgtcatgattttatcttttaaaaaatccatcaattgccctgaggcgggaacatgctatccaggtctgtcctaggagcaaattcagctgctgtggctggagagaattggtggatggggaagccagggttcagagagagggtcagagacatgatgggaggagctggggaccaagtcgtggaggccttggctttgactgtgagacaggagaggccctgatacctttgacagaatttttgtttcagttcctttttgctttgaacattttaaaaaaaaatatttattcatattctcctcttgacttgttagcaattgattcccatcaggtgattttgtccagaagttattatctgttcttttctgcttgtacactcctcccagcctgtggcagtgggcaggttttgcttttgttgtttcttctgacatctcagcaagaggaagggaggaagggcaagtgcgtgtgtgtccttaatcagcctctgatggcccagctgtttgcctcgggctaactcggagcccacctgtctgcaccagagtgagtggactgtcgctggctgactgttaatgctgtctgcctcatccggtgcttactgaaggtcccatgcactgcgttcagcctacttgcccgcagctcctggtcttcagcaccctggagccaagccccctttactgggcactcgcccagtgccagcagatgatagccaggaaattgtggctttatgccttctttctggactttatgaagtctgtttgagtgtccacaaatctcagggcgggaagctggtgctcagagaggttcagccacttgcccgaggtcactcagctgggtctgcctgactccatagtctgactcattactggccagtctctcgacacatcaggaaagagctcggtctcttgtgctttattttctaaagttaaaaagcagagagatcccctttccctccctctgagctggctccactttcgcacctgctctgggctgctctgccaggctcagccttccacttcctaaaaagagtgagtttgttttctctgaagctgctgtggggttttcttttcttttcttttcttttctttttctgaagctgctgtggggtttactgtcgcctcttgactgatttcactcagcatctgacattttcttttctttgaccaaatcccctgccagccagtgtgggccacagggcagtgccacagcagagcgtggaatgacagaacccaactgctgtctgtgcaagagtttgagcagaatttcaagcagaggacaggtgctgcggtgaatagaattttgtggggatggtgttgcattgaggtggcctgggtgaggctgtcttctggcatgtggcaacgggccagtccacggagcagctccccaaccccctgcacccccaagggccctgaagctaatcgtgcccaagagcacggcttttggagatgagcttattgatctttgtgatgtggaacacagagccagcacggttgtaagggctgtgtgataaatacatgagacaggaactcaatgggcggttcagtcttcatcatgagctgcctgagggagcagtgcgggcagccaggtgagggccagggtccgccgccaccccgccccttcccgagcctgctgtggggtccctgcgcgtgtccactgcccactagagatgcgctcttcagctgtctgcacaggaggagacttaggaagttgtgtgtgaggcatcagaaggcagctgggcctccccagcatgctaagacctcagcagtgcagggtgtggggcccgagctggatgtgccccattgcttgtatcaaaacctggagaaacagagctttccttgtgggccagggccacatggtcggtggagctgatgctgtcagtcggccgggtggtattttctggggacctactctgtgtaagacactgtgcttctaggaagacgcacattcactgccctcgaggcatgtgtaatcagtagcaaatcagtttaccgtgggtggtctcatctgacgtatttttgtgtccttcagtgaagtcatctaaaattactctgcttcacaattgaggaaatggttcctgaaattaaatggcttgttgacgcagttctgaggccttgactccacatcctcgtgcctttcccagtccttgacaggctctttgtggctgtaagacaagggcacaaagtgcatcttgcagagcagaagatgacgtatgtcagggacataacatcttagaaagatctggaagagagagagcctcatccagtgggagggtgtgggcaactgttcacggcagggtggccatacgtcttggtctgtctgggacagcccgggtttgtgcctgaggtcctggcactgctgttaatggtgccttttttcacttttaagatggggcatttcatggaaagatatgtaagttaggtcatatggcacagggcccttagcggggagggggagagatcaccttggaagggactaaatgtggcaggatcctcaatgcatatgcttggaatgaaagggagagggaaaagaacagaataatcaggtcagggactagctataatctaaggaattgccaccagtccaactggacttctctggaaatctgtccctgacgcctggccacagtcgcctactctgggctgctgtgtaccttggaggactctttgtaaacatcacacgatgctgcggatgtgagtttgatactcttgtttttccccactgtccagtgagctccttgggagcaaccaagttctattcacattttgtaatccccccaagttagtgtgacaagtagcacatggcaagcagcacatcgcagtgggtgagggactagtggggccactaccctgttccaggagggagttgctggaggccagaacctgggcagaaccttggaactcaggctgtctggatcaagagagccatcttctagcacccttagattaaaaataagtaagttctgattgtgtggggcagggatgtagggtatgggtcctatcccgagaagcaaattagtctagaaatgattctcctttctcctccactacccataccaatctatcttgaaggattatgcatttgaaattactctagtcatcttttcacattatttgtggtctttttttaatataaattttacatccttagctaatcacatttttgtgttgtttcctttatggatcctttatggctttggggtcccagaccaggagactatccatttattctactaaatagtttgttttttattgtgtatggttttttttccctaaaatgtttgtgtatgctatgaggtaagggtctaactttacttttctttaagggatagaaaataattctaacagcacttattgagcaatacatctttctccccatggcattgaagtgggatggttatattcatttatgcatgtgccaataccatactgagagctaagcagggtgaataaaaagagacatatgtcttgaatatcttgctgcgattttaaaacactcatgataaaggcaaaacccttataagctctcaaagcaaaaaaaaaaaaaaaatcacaatagcaagaaacagtagcctagtagaggactactttcaaatattgaagggcaattatttttaaaataaaatattttgttgaactgaactttctgggcaaaaatgaaagcagttttaaatatgtaaagactcaagtctgaaagaattactcagaattgtattccagcaaaatgagaagaaaccaagaaagaggcaaacctggaatataatcagcactcgtgagtgatggaatcactaaaaggcatagttcagtctaattatttgatgatgttgttaaatggtttttgttggcaggggactaagaagtagaagaagtaacagcagacgtttggtgtcggccttctttggttcatgcatgataaagataaacctcgttaaatgcacaaaatgaaaaaaagtacaagtaaatatgtatgttaaatatttgaatagctatcagagtaacagaaatagtgtcataacttccagaccactagagataaaataagggaccaaaacctgaagtcgatacctctaatgcaagaacagaaaactgagaaacagtgtaagtatgaggtctctcatggatccctggcatgggtatgaacattattttaaactgaagacatttgagattaaacagatagggaaagaagctttttcagagcttacttatcagactacagcaaaaacttctgggagcgagcctggcataaatctcctttctaggggagtctttactggctggaaagaagatggaaaagaccagttgcacctgcataaacaaaactttcccacagaccttcttatctcccatttgctcccctagaaaccgatttgttcttttcatagaagcccttcctctcccctctctctccgctgtgcagtatataatctcacctttagctgtttgaagagttgcatttttctttgtgcccctgtgcccatgtaggcataaaagtcagttttctcttgctcatctgtcttttgtcagtttaattcctaagctcccccccgccaaaagaatctataagggtagaggaagagcatttcttctctaacatgagaaaatctggccaaaaaaaaaaaaaaaaaacagcctacaaaaaaccagaaaacaaacctactagcagaaacgagttaaaacaatcactaatcacaaaaattcaaatggatttaaatcccataacagttctcaaaccaaaacagactcctagatgggtttcaaaaaatcaaaatccaactatattgtatatacagaaggtagattttaatcaaataatccaaaaggttgaaatgaaaaggatcgaaaaaccatgtctgccaaatgccataagaagaaacagatttagcattgttcttatttcacaaatatagatgaaagacaaaatacgtaaaaagggacaaaatgaatattttatattgattaaaggaaaatttattgagaaaacaaagtgctcatgaataattatgttgcagtgtgactgcaaaaaatacagtcaatgctgatgaaagtcaaaggagaaattaacaaaaaccaggatctcaagaaagggtaagtatgcttacatggaatgaaataaaacagtggttaaaactaacccagaagatatatagaaagatttgtatctaacaaatatttcccaaaagtagtaatattcacaaaaaataaactaagactggaagaaaattcataagcagataaatattactcagaagaaaactggcaaacaaagctgactgttgaaaagtcaggtgaatccacctcaaagtcagagataaggcaaagatgagaaatgttagggactgaatgattgtgtcccctcgagaattagtatgttgaaatcctaacccccaaggtgatggaattagaaggtggggcctctaggaggggattgggtcataaaggtggagtttcatgaatgggattagtgtccttataagaagagacacaagggctttcttcctgtctctgcttatttggccatctgaggacacaaggaggagatgtgtatctgcaaaccaggacagttgccctccccagacatcagatccgtgggtgctttgatcttggacttacaggctccagaactgtggaagataaatgccagaactgactaagacaacagctatcactgctttcaactgccgggtggatgccctagccggagccctatgacagcaagttaaagaaagatatctaaatattacgagaaagaaaaaacactatcattacttccagttggttagtcacctaaaggcagacgcagctgacaaactttgaactaataaaagatttaagaaagaagacaatagctgagctaggtgtgagtgaagaacagtgaagtgaaatggaaagaacagacctcatttacactcatgatgataaccataaaataccaaagaatcaacctggtgcccatgcaccaaacccttctgaggaaaacgataaaaattcaccaaagcacctgaaagagtaaaagagtcaggaagcagcatgtggggtctgccagctctccttcccctgcagctgggccatgtgttggaagcctggagtagcagcagggttactgcctggggtcccagagtcaaggacttagaactgctgtgcccgggctgcctagtagactctagagacgctccgctgcagtcttctggggtcaagaggggacaatcggaaagagctttaaaaactctcaggctgctcagggagttcttagatagtgctttgggctccatgtgcaggatctagatcctgcttgcctggtttgctcttctgattcgatgttccaatatctgctctggctaagaagctgccgagtgattgttaacaatggaaactgcatctttacctcctcagggtctgatacagcaggtgtggagtacagctcaggaatcggtcatacatggtccccctggatcacttgtgaaagactctgtcctgctgggcatgaatgccagcttgcattcctttaattagatggaaactaggaggtatttggtggctggaagtcatgaatttcagcccatacacttccttcaattacatgcttgtctccctcctgctgtccagagaaaaccaactgaatgatgaatagtgctctcaccattggtagctgatagcaaaaaaaaaaaatgatccagaacttcattttgacaaatgaatgcttctccctgatacctagtttgtgcttctcattttcccagggatgcattaatgctagagaactttagtgaatcactacagaattacttatgcattttgtagttaataggcaaaatatgttgtgcctgtaacatagctcctttgatgttcttagtaagcagaacgtagtatggattctactttattgacttccagatggtgcctctaaaggttatgactatgagctagttaaatgttttgtccctaccagtgggttcatggcttcataaagacctgtggtaggtagcatctgagtttgtagtttgcatttatttctgacttttaagtctacattgacacaatctctttatcttggctttgttgaactctgcctcatttattatgaaagctgacttcaggttgagggcaaggcaaagaaagaagccttcgtatttcaaaagaacaagatgggtagccacgacacagtcaaattggttaatttctgttcctcgctccctaaactgctaaatttcattttatatatcttccttcagtccatctacttaatatattttatgtggttagacggactgcatttttcactcatcctgttttccatgggtttttctcatcatcattttaatagtgacataattcatagagatgatactttctagttcaccattgttggatttagtatgtttctaacagattaataattataggtcataagaaatggaaaaaaaattatagggaggtacattttcatattcctcctaatattccccagcagtaacaccttaaataactctagtgtaatatcaaagccaagaaattaacattggtatattccacaaagtttattcagatttcaccagttttacattcatgcatttttgtgtagtatatataattctaagcaaattcatcacatgtattgattcatgtagccaccaacaaattaagataaagaactgttccacgactgtaaagatctcttgcactatacccttatagccacatcccgcttgtccctaactactggcaaacactaatccatctctgtcattgtggcatttcaagaatattttatgtgtagactaatatagtttgtaaccttttgagggtggctgagtagtggtctgtggtatggatgtgccacaatttgtgtaactattaatccattaacagatatttgagatgttttcagtttttcgctattgcaatcatagcttctataacatccatgtccatgtttgtttgtttttgaagatgtttccattcgtctggtataaattacataagcacgcaattgttaggttgtataataagcagatgcttcattttataagaaactgccatactcttttccagagtggccgttcccacctaagtgatcaagtaattccgcatcctccccagaatttggtgttatcactattttttttattttagccacgctagtaggtgtgtagtgataacccattgtgtttttaatttacattctcctggtggctaatgctgttgaacatcttactatgtggtggttcgtcacctgtatatcctcttcattgaaatatatgttcatgtctgtttgcccgttttctagttagattgtgtggggttttgtttgttttatttttactcttgagatttaagagttctttatgctagatatgccttttgtcagatatgtgttttgaaaatatagtttgtctttctgtagtttatctcttcatcttctttacagggtctttcacagagtaaacatgttctttttaaaaattacagtgaagttttttatcaaattttactttgatggattgtgtttttgatgtcaagtcttggaactcatagcctagagtgctgaagatttcctcctatgttttgttctaaaagtttcacatttttaagtcttacatttaagtctgttctttaagttgatgtcaatttttggtatgatatctgagatttacatcaaagtttatccttttgcctgtggattttcagttattccaggtccactcattgagaagactatattcctcttctgaattgctttgaaaaaatcagttgggtatatttgtgtgggtctactattgggttctcaattctgttttattaatctagatatctcttcctctattatagtcttttgctttcatcgtatagtaacgcttaacattgagtagagtgtttcttcccattttattgttccttttcaaaattgttttagctattttagtttctttgtttatataaatttcagactgactttgtgtatccatatgtacaaaactcttgctgggtttttaatgggaattgtgttaagcctacaggttctcgtagggacaattatgttgaatcttccaatccatgatcatggtatgtccctcttatttcaatcttctatgatttttccatcagtattttgtagttttcaacatgtgagatttatgcttgttttgttaaatttatatttgtttcatttttgaccagttgtaaatgatactgcattttcagtaaccacatgtttactgttagtatagcaattattttatgttgatcttgtatttctgaccttgctgaacttactcattaggtttagcagttttttttttaattgtttttgttttgagattcctttggattttccacatagaccatcatgtcacctgaaaatagtaactttttaaatttctttctgatttctaggcctcttacttcctttactttcctggctaggatttctagtattatgctgaattagaatgttaaaagtgaacaactttatcttgtttctgatcttatggcgaaagcatccagtctttcactattaagtatgatgctagctgtaggttttttgtggaattgcttttatcaggatgaggaagtttccctctattccagttttctgagactttttaatatggatgagtgttgagtgttattacttgctttttctgcatcaattgatataatcaggtgatttttcttccttggcatcttaatatggtagattacattgatcagttttcaattattgaactagctttacactcatggaacaaactctacttggtcatgtgtgtaattccttatatatactgctaagttgtattgccaatattttattaagggtggtttatgtatatttatgagagaatgtggtctgtagtttttgttttgcattttataaattttttctactgtctttgtctagttttggttatgaggttaataaaagcctctgtgttttatccttttttatttactgggagacagttatagaattgatattaattcttccttaaatgtttgttaaaattccccagcgaagccattcaggatgtggagatacctttttaaaaaacatttaaaattatgaactcaatgtgtttaattgttttagggatcttcagcttatttatagcctattggttgagttgtggtagtttgtacttttcaaggaattggtgcatttcatttaagttgctaaatgtatgtgttaatttctatgtaaagagttgttcatagctttcctcatcattcttttgatgtctacaatgtctgtgtagtgacacatagaatacattcgtggtattagtttgtcaattttattgatattttcaaagaagattttcatttcattgatttttttttcttttttttctcttctccgtgtcagtgattttatacttttatatttattatttacttccttctacttgtggggcttgtcttctcttttctagtttcttaccgagtgagcatagatatagacttgaatctttttctctttcttaaaataagcagtactataaatttattcttagcactaccagcatgtcatacatattgatacattgcatttttattcagttcagtgtatttttttccatttccttgagactttctctttgactcatggattatttagcaatttggcattcagtttccaagtgtttggagattttcttgtcatcttaatgctattcatgtctagtttgattccattgtgggcaaatatcacactttgtgtggtttcacttcttttaaatgtattgaggtttttcttaggctcaggatatggtctatcttggtatatgctccatgagtacttgttggtagacagtttcctaaatgccaattaagtcctgttgtttgatggtgtaagttcttttatatccttgctgattttctgtctagttgccctgtcatgaattattgagagaggagtgttgaaacctccaaatatagttgtgaacttgtctatatcttttgaaaatttccatcagttctggggtcatgtattttgaagctttcttgtttgagaaaggatttatgattgctgcatcttcttggtagactgagcttttatcattatgtaaatttatatctatctttcataattttcttttctctaagatctgctttatctgataataatatagttactcttgtgttttttgagtaatgtttgcagggtatgtgtgtctgtgatatatatatattatatatatatattcttcgttttttctttcctgcctatgatgtacttaacttttttttagaatttcttttttagaatttttagaatcttttttatttatagtgtttttgagtatgtctctttgtacacctatttcatggttgctcttgatattacattttatgtatgtaacttattacgttactgactactgatataaacatcttactggttcaagtaaagtagataaattttctcttccttcttttattgtttttttctctctttcaagaacttccttgagccatacttcttgggtgattctgctggtcactatttctcttagttttttcttcatctgaaaatgtcttgacatttcttcattattcctgaaagatattttaactggatttagaattttgagtgtacagtaagttatttcagcattcggaaactgtcataccacctcctgctggtctccgtggttactgttgaaaattctgctgtcatttaaatttgttgttgttgtttagttttgtttttcccccttacggatcatttttctctggctgctttcaagattttctctttgtgtttaatttttagatgtttgattatgatgattcttggcattaatttttttgtatttatctggtttgggttttactcagcttcttgaatctgtagatgtatatcttttgctaaatttggaaaatttttaataatttcttcaaacatttttcattctcattttctttctcttctttttctgagactctcatgacacaaatatcagattttgttatggcttcacacccctgcaggctgtgtcgattttttttcttttttttggtctattttacctttgttgctccgattgcataatttctattctgtcttcaagtcagattctttcctttgctatctccactctactattgagcccagcctacatgttggtaatcccagttactgtatttttcagttctaaattttcatttagtttttctttatatcttctatttatttgttgagactttctattttttcactggtttcaaacatgttcttaattgcctaccaaagcattattatgattgaggttttaaaatccagagaattccaactttctgaattatctgttttggcatctgctaattttctcttctcattaaagttgaggtttttttcttgattttggtattacaggtgatttttaaaattatatcctggacattttgggtattattgtttgagactccaagtcttatttcagtgttccttttcactagacctcctctgacactgtgctagcagaggagggaggacaccacccctgctgtcgtgtggttcaggccccccactcagcctctgttgacacctgggagggatggggaccttggtactgctaggtgggagtggaagtccaggctccccaagtgttctccactgaaacagcaggaggcggctgggtcaagatgaggtcactgcttggccttctctgacatcacctcttgcaagtatggggaggagtgtctcccttttgcctggggatgtttgaatctagagtgctccctgggcctttgctgatgaggctgctggtggagtccagctttttcctttggtgtttccctggggcagcgctcttggctagacacggtccagctgtcaggctgcttctctcctgaccatttggcgagagagggcaagctttcctcaggacttctttggtctgtacctgttggggtttttttggtgcattcttctccagaacccagtttggaataggtaagataaatagtaaacctagggatgtcagcaccatgccgttctgcctgtcacaaaggtgtgatcccttctgccttcttctctgaactgttgacagccttcttatgtttatttatggattatgtgaagacttcttagtcatatttagcaagagtaataatgattactcaggtcagcctgtcataacaaaataccatagactgggaggctttaaataatagaaatttattttcacacaattctgggagctgagaagttcaagatcaagggtctggatttggttccctgaagagaactctctctggtttatggcttccttctcattgtgtccttacatggcagagagaaagagagagggagtgggagagggagagagaggggcacgtgctggcttccctcttcctataaggccaccagtcctatcagaatagggctctacccctgtgacctgatttaaccctggtcagctcttgcttatcgtttttagccgtattacctccttatcgtttttcttgtatttatgctgtcatagcaagtggcatttttctgaaagcatatgcttagtttatttagactttatatttattcagattaaggttggtcaatttcttcactcaatctgaaggaaaagctctttaaaaaatcagcctgatcatttttcaatgaacctctggtgtggactttgggcatccgattgtgtaggaggctctcaaggctggctgtttgcccagtcagcattgtcactgggggacgagctggcagggtgcaatgttgttcccttcacctttgtgtctccaagtgaccctttcctcatagggatgaatttccacccatgatgaatagtccttgtgtgcatagtaatcccagtgtcagaacatcttctccttccactgctggggataattagcttcctttttcttttgtttcatacatctggagccagaaaaggcataacaggtcacatagtttagaaatggacatactttttaaaaaatttcatgagctccttcacgtccatttatctaggctacgtaaaactgttagaaggaatgcccaggctacaagctataagcaggcaggagggtggggcccgtggagcccagctctctcccacacgaggccctgggagttcagtcaaccatcctgggtcgcaaaagtcattacccaagaaggcgggagtaaaactcgtgcttctgccctcttgccctgtacgaggtgggttggaactgagaaggccaggaccttcaaaatgctgcattctccctgagaagttggaattgaaaaaaataaaatctaccatccagtgcaagacgatgaaaaagaagcatgactgttttaggctgtgctcagtcagggctcagagtcttccatgggaattcacaacagatgagggaaggggtgcctcctggtgctggtttgatatgtccagcagaacccaggaaattccagcaccaattgtagtggcatgcaaagtggtctgatctgtgaggctctgggcacctggcagaatggagtgcagggcacctggagagaagtccccctccggccaggtccacaggatctccatagacacggtagcaacacaggttggggattcattccagtatgtccagtcagcaaggttcatgtgccatgaacatgctctgcagatggtgattggggtttgagacatgggttttctgcagcctgacaaatattccatgctctgataagtgtccaggtgtgaggccaggtgtgcaggcaatgctgtgagagggcagccaagggctctgcccctttctctcctgcgtcctcctccctccacatccatcctgtcccacccctgtgactacatgtgggtttttttgtgtgttttttttttttctgagactgagtctggctctgtctcccaggctagagtacagtggcgggatctcggctcactgcaaccttcacttcccaagttcaaacaattcttgtgccttaacctcctgagtagctgggattacaggtgcccaccaccattcccggctaatttttgtgtttttagtagagatggggtttcaccatgttagccaggctggtcttgaactcctgacctcaggtgatccgccctcctcggcctcccaaactcctgggattcaggcgtgagccaccacacctggcctgcatctatatttttaagctcttgtgccatttagccttcattaatttttttaagaaaacattacagatgaaaactgtatgaggaatgaaacactataagaaataatatggaaactcaatttttaaaaatcagctaaaaatgaacttcaaattaaaacacatacagaaacatctcactttgagcaagcattcacaaacatagcaaaaggcaggtttggactcttaaacacttaagacaatagaaactgacaaatgatttgaaaataattacactcaagtaagaattaaaaacacaaatgagagaaaccctttaaaaagcaactttgaaaagaatcaagtaaaattaagagagatgagaaataatatagccatcaaaattaaagacagtggaggcatagaatgtcagatgagacacagttgaaggagcagaggcagtttcctgcgtgaatcatagaaagctaaatagatggaaagtaggaaagaatgatttacggtcgtgcaataatatccaacacttctgtagtgcttctgtgcaccaggtcctgtttcaaatgctttacatatattaacaaccttctgaggaaagcgctgtgattattttcagatatgacagctggagcacactgtggccaaggtcatgcagaaagcaggtctggaagcctgcaccccccaggagaggctgtgcctgacaaggagggctgcttcctctcatgccggggataggtgctcccatacacactggctagaatagtagaaggcaataataaattgcatgtgggagaaatattaaaagattattttcagaaaacaggtaaagttatggctcacatacagatataaaaatgagcatgttgaagaatctatttgactcatatcacatgaggaaacaaagcagatgttctcagttcaatgggaaagtcaaactagtacaaatttatatagagtaaaggaatttcgagatgaattctaaatggacacagaacttgtttatctaaaggggcaggaagtcaaggcactaccaattaaatcactactgggcgactgagaacttccgcatctatcagctgcttacggtccgcgcacagtggcaaagcagctcagacagtgaacagggcgagacttgctaagtgagatctatgtgctgtaggggacacatcgttttccattgaaatacaatgatttttttcaacagaagccatgtcccaaaagaacagctgaggatgtaataatattgatgaaaaacatacatcctcagcttcaggagataaaagtctgaggaaagatatgtgataggaaatgagcccaagacatattgtgcaaaaaagctgcaggaatgtccaaagccaaaaaaagatcctagaagcgatgagagaaaaatagatagcttgctaacaaagagatggcaattagactgactgcagaccttttaaaggcaacagtagaagccagaaaaataaacgaaaataacgtcttttaagtatgaaaggaaataattgtcaacctagagttttatcctgagctaaaccattctttacctgatgggcaaaatcaagacattctcgggaaaacatatactaaaggagtttaccgtgcaggggctgtgctactattttaaaaaactaccagaagacgtttaggaactaggcatgagaagcagtgagcgaagcaattggcaaagattcaggtacatgtaaacagatttggttatataaaataataatgatgaatttgagagtattaaaaacaaagtgggacagggcgcaggggctcatgcctgtagtcccagcactttgggaggccaaggcaagtagatcacctgaggtcaggagttcgagaccagcctggccaacatggtgaaaccccatctctactaaaaatacaaaaattagccgggcgtggtggcatgtgcctgtagtcccagctacttgggagggtgaggcaggaggatcgcttgaacccaggaggcagaggttgcagtgagctgagatagcaccactgcactccaacctggaacctgagtgacagagcaagactccatctcaaaaaaaaaaaaaaaaagatggaattaaaatactggaaaatatagcatgaaatagtaacttggacagtgcttggaggtaaaaccctcaggtgtacttatatgactctggaaggccatggagacgtcagctttaagtgaaatatacaaggttaaagtgtgagaataaccaccagaccagacacattaagaatactatatttaacttccaaacaagtaggggtcgaatggggaagggatgaagaaaacaggagaaggccggcgcggtggctgacgcctgtaatcccggcactgtgggaggccggggcgggcggatcacgaggtcaggagatcgagaccatcccggctaacacggtgaaaccccgtctctactaaaaatacaaaaaaattagccgggcgtggtggcgggcgcctgtagtcccagctacttgggaggctgaggcaggagaatggcgtgaacccgggaggcggagcttgcagtgagccgagatcccgccactgcactccagcctgggcgacagagcgagactccgtctcaaaaaaaaaaaaaaagaaaaaaaaaagaaaacaggagaaacctaaatgcaatccaaggaggaagaagtcaaaagcataacattagatggtagaaatgaaaacaaatattacagtagacaagataaaagtaaatgggatggccagctggttaaaacacagatctccccaatatatctctatgcatttaaatcgaacgatagactgtttagatgaaactaaaccatatatacgtaaaggatgaacgcaaaaaaggaaaaacaaaaacaggaacaaaaataaaatgtgagtggctatgtttacaacaccccccccccacacaaacacagtaagaaaaacaagtataattaaggttaaataaggtcaggtgatagtgattttttaaaactaaggatatataacaaatcttacatgtatatatctaataaaattgctttgaagaaaaattggtagaatttaaagtttactggataagtccacaattacagtagaagattttaatgtacctcttttagtaattgatagtgtaacaaggggaaaaaaaatgtaagtatgtaggagttttgaacaacacagttaacaagtcttacccaatatatagatatagatacagatatagaaaaaatgcatcctcattccactagaaaataaatatatggaaaactggatatctaaatgtgaataaaaacatttagcatgtgtggtgtgagtttgtgtgtgtacgtgtgtgtgcacacatgcactcacatatgtataggaatgcaggcagacatacatagcctttaaatgcttatgttagaaaagatacttgtctaagcatctttaccatatgatccaacaattgtcctcctcagtatttacccaaaggagctgaaaacctgtgttcacacagaaacctacacacatatgttgatagcagcatagacatcttttttaggaaaccctaaaggcttttaatatcttttttgggaaaatgtgtgagataattaccaaactcaagaagttataaaatataacattaactccaatgaaaaaaagaaggaggaataaagataaacctagaaatgtattaaataagaaaactaaaatagagatcaacgaaggacaaattggttttaaaaaagaactaataaaatcaacatacctcaggaaataattaccaagaaaacaaagaaggcacaaacaaacatttactggatataaaaggggttttcaactacagaaaaatacttaaaaatagaatattgtgacacaattttatgccaaaattttggaaacttagatagatttaatattttctagaaaaatagaccaaaaagggaatagactagcaaaaaaacagactttgttttttaaagcagtttgaggttcatagcataactgtgtggaaggtacaagttcccatgtcccctcccaacccccacccaagcacagcctcccccatcatcaacatcccccaccagggccgtacaattgaaatagatgaactgatgcagacacatcattaccacccagagtccatagtttacatcagggttctctcttggtggcgtatgggttctgtgggtttgcacagatgtataatgacctgtatcgaccattatagtatcattcagaatagcttcactgccctaaaaatcctcggtgctccacctattcatcccgccctctctctgcaatccatggcagccattgacctgttatgttttgttttgttttgttttgttttgttttgttttgtttgagatggtgtatcgctctgtcgcccaggctggagtgcagtggtgcgatctcggctcactgcaacctccacgtcccgggttcaagcgattctcccacctcagcctcctgagtggctgggactacaggtgcacgccaccacgcctggctaatttttgtatttttagtagagacagggtttcgtcatgttggccaagctggtctcaaactcctgacctcgggtgatccacctgccttagcctcccaaagtgctgggattacaggcgtgagccactgcgcccggcctgatctgttttgctgtctccattgctttacttttcctagaatatcatataattggaatcttacagtctgtaatcttttcagattgacttatttcatttggtaatatgcatttaaggttcctccatgtttttttcatggcttgatagcccatttctttttagcactgaataataatccattgtttggatatagcacagttagtttatccatttcacctactgaaggttgcttccaagttttagcaattatgaataaagctgctatcaacatatgtatgtaggtttctgtgtgaacacacgttttctgctcctttggataaatacaagggaaggcaattgttggatcacatggaaagagtatgcttcgttttgtaggaaactgccaaactgccttccaaagtgactgcaccatttctcatgcccaccagcagtgtatgagagttcctgttgctctgcatccttgccagcatttggtgttgtcagtgttctggattttggtcattctaatagatgcgtagtggtgtctcagtttttttttttttaatttgtattaaatatgacaatgtggaacatatttctatgtgcttctttgccatctctatattgtctttgctcaggtgtctgttaaggtctttggcccattattttaattggattgtttgttttcttattgctgagttttaagagttctttgtatattttggattacagttcattattagatgtgtcttttgcaaatattttctcccaatctggaggtcatcttttcattcttttgatcagtatatttttaaaaaagaaattcaaaaaggtaggtttacaggcaagttccacccagcataaaatatcattatgaacataaatgtataagccttttttattattatactttaagttatagggtacctgtgcacaatgtgcaggtttgttacattaggtgtacatgtgccatgttggcttgctgcatccattaactggtcatttacattagatatttctcctaatgctatcccacccccagccccccaccccccgagaggccccggtgtgtgatgttccctgccctgtgtccatgtgttctcattgttcagttcccgtctatgaatgagaacatgtggtgtttggttttctgtccttgtgatagtttgctgagaatgatggtttccagcttcatccatgtgcctgcaaaggacatgaactcatccttttttatggctgcatagtactcatggtgtatgtgtgccacattttcttaatccaatctgtcattgatggacatttgggttggttccaagtctttgctattgtgaatagtgccgcaataaatatacgtgtgcatatgtctttatagtagcatgatgtataatcctttgggtatatacccagtaatgggattgctgggtcaaatggtatttctagttctagatccttgagaaatcttccactgtcttccacaatggttgaactagtttacactcccaccagcagtgtaaaagcattcctatttctccacatcctctctagcatctgttgtttcctgactttttaatgattgccattctaactggtgtgagagagatggtatctcattgtggtttggatttgcatttctctgatggccagtgatgatgagcattttttcatgtgtctgttgtctgcataaatgtcttcttttgagaagtgtctcttcatatcctttgcccactttttgatggggttgtttttttcttgtaaatttgtttaagttatttgtagattctggatattagccctttgtcagatgggtagattgcaaaaattttctcccattctctaggttgcctgttcactctgatgatggtttcttttgctgtgcagaagctctttagtttaattaaatcctatttgtatattttggcttttgttgccattgcttttggtgttttagtcatgaagtctttgcccatgcctatgtcctgaatggtattgcctaggttttcttctagggtttttatggttttatgtcttaggtttaagtctttaatccatcttgagttaatttttgtataaggtgtaaggaagggatccagtttcagctttatacatatggctagccagttttcccagtactatttattaaacaggaaatcctttccccatttcttgtttttgtcaggtttgtcaaagatcagatggttgtagatgtgtggtgttatttctgaggcctctgttctcttccattggtctatatctctgttttggtaccagtaccatgctgttttggttactgtagccttgtagtgtagtttgaagtcaggtaatgtgatgcctccagctttgttgtttttgcttaggattgtcttggctatgtgggctcttttttgtttccatatgaactttaaagtagttttttccaattctgtgaagaaagtcattggtagcttgatggggatggcattgaatctgtaaattaccttgagcagtatggccattttcacgatattgattcttcctatccatgagcatggaatgctcttccatttgtttgtgtcctcttttatttcattgagcagtggtttgtagttctccttgaagaggtccttcacatcccttgtaaattggattcctaggtattttattctctttgtagcaattgtgaatgggagttcattcatgatttggttctctgtttgtctgttattggtgtataggaatgcttgtgatttttgcacattgattttgtatcctgagactttgctgaagttgcttaatcagcttgagatttttggctgagacaatggggttttctaaatatacaatcatgtcgtctgcaaacagggacaatttgacttcctcttttcctatttgaataccctttatttctttctcttgcctgattgccttggccagaacttccaacactatgttgaataggagtggtgaagagggcatccttgtcttgtgccagttttcaaagggaatgattccagttttggactattcagtatgatattggctgggggtttgccataaatagctcttattattttgagatacgttccatcaatacctagtttattgagagtttttagcatgaagggctgttgaattttgtcgaaggccttttctgcatctattgagataatcatgtggtttttgtcattggttctgtttatgtgatggattacatgtattgatttgcatatattgaaccagccttgcatcccagggatgaagccaacttgatcatgatggataagctttttgatgtgctgttggattctgtttgccagtattttattgaggatttttgcatcaatgctcctcagggatattggtctaaaattctcttttttggttgtgtctctgcccagctttggtatcaggatgatgctggcctaataaaatgagttagggaggattccctctttttctattgattggaatagtttccgaagaaatggtaccggctcctctgtacctctggcagaattcggctgtgaatttgtctggtcctggacttttttgggttggtaggctattaattattgcctcaatttcagaacctgttgttagtctattcagagattcaacttcttcctagtttagtcttgggagggtgcatgagtccaggaatttatccatttcttctagattttctagtttatttgtatagaggtgtttatagtattctctgacagtattttgtatttctgtgagatcggtggtgatatcccctttatcattttttattgcgtctatttgatttttctctgttttcttctttattagtcttgctagcggtctgtctattttgttgatcttttcaaaaaacccgttcctggattcattgattttttgaaggtttttttgtgtctctatctccttcagttctgctctgatcttaattatttctttccttcagctagcttttgaatttatttgcttttgcttctctagttcttttcattgcgatgttaggatgtcaattttagatctttcttgctttctcttgtgggcatttagtgctataaatttccctctacacactactttgaatgtgtcccagagattctggtacgttgtgtgtctttgttctcattggtttcaaagaatatctttatttctgccttcatttcgttatttacccagtagtcattcaggagcccgttgttcagtttccatgtagttgtgcagttttgagtgagtttcttaatcttgagttctaatttgattgcactgtggtctgagagacagtttcttgtgatttctgttcttttacatttgccgaggagtgttttacttccaattatttggtcaattttagaataagtgcaatgtggtgctgagaagaatgcatatcctgttgatttggggtggagagttctgtagatatctattaggttcacttggggcagagctaagttcaaatcctgggtattcttgttaaccttctgtctcgttgatctaatattgacagtgggctgttaaagtctcccattattattttgtgggagtctaagtctctttgtaggtctctaaggacttgctttatgaatcttggtgctcctgtattaggtgcatatatatttaggatagttagctcttcttgttgaattaatccctttaccattatataatggccttctttgtctctttttatctttgttggttgaaagtctgttttatcagagactaggattgcaacccctgctttttttttgcattccatttgcttggtagatcttcctccatcccttcattttgagcctatgtgtgtctctgcatgtgagatgggtctcctgaatacagcacactgatgggtcttgactctttatccaatattctagtctgtgtcttttaattggggcatttagcccatttgcatttaaggttaatattgttatgtgtgaacttgatcctgtcattatgatgctagctgattattttgcctgttaattgatgtggtttcttcatagcatcgatggtctttaccatttggcgtgtttttgcagaggctggtaccagttgttcctttccatgttaagtgcttccttcaggagctcttgtaaggcaggcctggtggtgacaaaatctctcagcatttgcttgtctgtaaaggattttatttctccttcacttatgaagcttggtttggctggatatgaaattctgggttgaaaattctttaagaatgttgaatattggcccccactctcttctggcttgtagggtttctgccgagagatccactgttagtctgatgggcttccctttgtgggtaacccgacttttccctctggctgctgttaacattttttcccttcatttcaaccttggtgaatctgaaaattatgtgtcttggggttgctctttttgaagagtagctttgtggtgttctctgtatttcctgaatttgaatgttggcctgccttgctaggttggggaagttctcctggataatatcctgaagggtgttttccaacttggttccattctgctcatcactttcaggtacaccaatcaaacatagatttggtcttgtcacatagtcccatatttcttggaggctttgtttgtttcgttttactgttttttctctaatcttgtcttctcacttcatttcattaatttgatcttcaaacactgatatcctttcttccacttgatcgaatcggctattgaagcttgtgcatgtgtcatgaagttctcatgctgtggttttcagctccatcaggtcatttcaggtcttctctatactattcattctagttagccattcatctaaccttttttcaaggttcttagcttccttgcaatgggttcgaacatgctcctttagcttggagaagtttcttattgccgaccttctgaaacctacttctgtcaactcgtcaaagtcattctccatccagttttgttccattgctggcaaggagctgcgatcctttggagaagaaggggtgctctggtttttggaattttcagtttttctgctcttctcctcatctttgtggttttatctacctttggtctttgatgttggtgacctacagatggggttttggtgtggatgtcccttttgttgatgttgatgctattcctttctgtttgttagttttccttttaacagtaaggcccctcagctgcaggtctgttggagtttgctggaggtccactccagaccctgtttgcctgagtatcaccagcagaggctgcagaacagcaaacattgctgcctgatccttcttcttgaagctttgtcccagaggagcacccacctgtatgaggtgtctgttggcccctactgggagatgtctcccagtcaggctacacgggggtcagggacccacttgaggaggcagtctatccattctcagagcttgaacgccgtgctgggagaaccagtgctctcttcagaggtgtcagacagagatgtttaagtctgcagaagttgtctgctgccttttgttcagctatgccctgcccacagaagtggagtctatagaggcagtaggccttgctgagctgtggtgggctccactcagttcgagcttcctggccgctttgtttacctactcaagcctcagcagtggcggacacccctccccaccaccaggctgtagcctcacagatcgatcacagactgctgtgctagcagtgagcaaggctccgtgggtgtgggtcccactgggccaggcacaggagggaatctcctggtctgctgatcgctaagaccgttgaaaagtgcagtatttgggcgggagtgtactgtttttccaggtacagtctgtcacagcttcccttggctaggaaagggaaatcccccaaccccttgcacttcctgggtgaggcgacgccccaccctgctttggcttgccctccgtgggttgcacccactgtccaaccagtcccaatgagatgaaccaggtacctcagttggagaaatcacccatcttctgcgttgatctcgtttggagctgcagaccagagctgttcttattcggccatcttggaagcaactcctatgtataagtcttaactaaaatatcagcataacaaagtctagcaataagttaaaaataaatcctaacaagtttaggcttctattaggaatgcacagtttgtttaactttcaaaaaagtccattaatataattcattctattaaaagattgaggcagaaaaaaataaatgatcattctggtagctggagaaaaatcagttgatgttatttaaaacccatttgtaattggaagaagtttcacctaacctgacataggggtctcacttaatgctgaaacattagaagtttctaaacgtagaataaaataagaatatcagtgtcatcactttttaaaaatatcttagtgactatatgaatttcagtagtaatacaagtaaaataataaaatgtttatgaataaggaataaacctgttatcatctttataggccatatctgttttttacatagaaaatccctagagactgtctagaaaaaatatatctgatacaaaacaagatctatcgaagtatcaaatgtgtttctatattcttacaacagacagttagaaaatgtaatttcacaaattttattttcaatatctgcaggtgttgagtaccaaaaaataaatttaagaaagaacaacataaatgttgagttgtatcacgtttatgcctgggaaaactcaataccagatgccaaatttttccaaaataaattgagtgtgattaatgtgattccaactaaatttaatgtgattccaactaaagtcttaacagggacttcatgagactgtacaagtaaatttaaaatttacaatgatgagcaaaggatcagtaatgagcaagaatagtaaaacaagacaattttaaagaaaaagaaccaagttgggggactttctgtgccaaatgcaacactttcataatgctgtaaggattaagatgatgttttgctgggtcagggatagacatgtaacacaaggaacaaaaatagggagtccagaaactggatatctgctgtgttaatcttctcccatgttacttatagctttgctgtaatccgtcctatgccatatccagttgttataatatcccatgttacattcaatttaatatgccaactagtggctaaagaaaagatttctgagtgggagctaaacactgggtactcatggacataaagatggcaacaacagacactggagactactgtagggggaaaggagaagggggccaggattgaaaaactactggatactctgctcactgcctgggtgatggaatcaattataccctaaacttctgcatcgcatgcgatatacccatgtgacaaacatgcacatgtatgtcctgaatctaaaataaaaatcaaaatatgaacagatagcacgtgcctgcagtcctagctgccaggaggctgaggaaggcggatggcttgagcccaagagtttgaggctccagtgagccacgatcgcaccactgcactccagcctgggtgacaaagcatgaccctgtctcaaaataaataaataaacaaataatataaataagtaaatattttctttttttaaaaaaaggaaatattcttgaatgcatttttctggaagcctcctcctggtacctcagaattctgcttcctggaatctctggcaggtagaaatgaccataaaagtttgattctactcaagacttttttggtcatggactatgacaagccacattgctgattgcagaccctcaacattttagaataaaatatagaactaaaaagatttatgacagggtgtgtctctccctctgtcttctgttcagaaaatttacccattctcaacagccttgctttccctctgcaatctgggcattgcttccgtcagtggtgtcttcacatggaattggggaattggcagctttttttcccctttcttcagagatttaaagtaaatgacaccttagatcagatagatgagcatcatccttcctcctcccttcctttttggatagatttcatcttcatctctcttgcccttctctctctcagtctttcaaggttgctgagagctcagagggaatgggattgatttcacatgagaccttactatttagggtcatcctgaacccatgcgaagcattttctttgcagcaggacagagtgcctggatttcttcttcttattgttattttattattattcatctttacctgaatgcagaggctcattctggtgaacacgtgccctattgggagttggtcttgctggacttctttgatggctggacccctggctttttctctcaaggttataagagccgggcttctgggtcagatgatgctttctctgtggaggcacaatcactctcttcttttctggctcagtgttgaggcctcccgtgctcagccgtagaggtcaatgctacagagctgactgaggcaggaggcaaggctgagcctaggatcagagggctcttgttccagggccagcagctctgcaggaatgagaccaggcaccattgtgtgaggatcctaggggatgtggaggaaggaaaggtgtgatctcagacccacccacagggtccacctgtgccccatgggctccccctgcctatactgccattgacgtctgaaagcacagcttgtaatcccataaggattgggcttctgaatcctgcctggggggccaagcagtggtttgctcccaagccctctttcagcctcactgcttagggcaacatggtgtaagcaaacaccatgatccaggcaagccagaccttcctggagcctccttcgttctggcttatctccaagtgtgtgatcccaccatgccctccgccaggggcctgtccacatccgtttccgtctttgggagctctggctatcctttaaagcctatgcagacacctctcctcctcctacccccgctaaggacacgtagcttgcgtcctacatgtttgagttacatttgccccagtcaccccctccgtggtgagggtagggctcagagctctcctcacaccaagagtgggccccagtcattgctggctgggggaggacaaaggcagccagataaaggcagctcctgcaaggacggagaggccacaggccggcatcttcacaaactgtggatgtactgtgtcttccagtagtcaaaataaagaatatatttggccattttcagactatttaatacagaacagtttacacacagaagaggagtgaggaggagaatgaatccctgcagccctacccctgtttccacggttatgggtgtttgccagcacagggctgcccagcactggtgagggggtcactgttggctggcatctgtcgggcatccccggggaagctgcgccggtgctgtggccactgaggtcctcataggggttctggccactcacatttccgaggttcttcatttcccacctcagatcactgttttcaaactcagttttcagcaacagggcctttcttcaaactcatcttatctccacccctaatgctcaaaacagataaagtagtattagcacaaatccattacaagagtttacttttatactatgtacttataaaatcaatttgcctatgggaaagaagcgtaaaactaccatcatgggtattaagatttggattttgataacatttatgtgttacaatttcatgtagctcaatattctgtttggatgaaaaacattcagaaatcactgagtcacaaatcactgagtcacaggtaagctgttgctaatagcaacagtttttttatcttgtttttacctgtttgccttgtgatctcaagagtctcttcaattaaattgatccaaatgcttgaaagaaaggcttgtaggaactttttttttttcagagttgaatcactgatctaacagatgctcagtcttgattataaatatgaaaatcagacaggaagaaacccaagcttaaaataagcaaaactttgttccccataacatgcatcaaaccacactattcttaatttttaatttatttttatttcaaaaatatttatgtttttattttattttattagagacagggtctcgctctgtctcctaggctggaggacagtggtgcaaacatagctcactgcagcctcaaactcctgggctcaactaatcctcctgcctcagcctcctgagtagctggaaacataagcttatgtcactgcactgattaattttgtcagtgttttgtttttgtagagatggggtcttgctttgttgcccagtctggtctcaaacttctggcttcaaatgatcctcccctctgggcctcccaaagtgctaatattataggtgtgggccactgtgcccagactatagaccatgctttctatgttgctgctactgagggtgattgatgggggaacgcatcccacgtctggtgcgggttagatgccatgtaattggagggacagactttaattttttaaaagcaatgcaaagctgaaatctcatttggtgactcctttataagagattcaaatgcgtgcaaattcatggccagagaggctttagtttaacttccatgcaaaaaggagttaaacaggacacataaattaacacaacggtagtctctaagagttaaaattttgttaatagtcatttgagtgtgtgacttttattaccattttcaaattcaaaggaactaaaatattggaggtaaatatttccagaaaccttgaggcgcctccatagggtctcagggctccagagaacctagcttgaagatcatgatactatccagagtgagcttgtgcaggtccacattttcagctattttgtgcccaatcaccatttataatgtgactcattaacagtcagatacagactacggtcaagcaaagaatatttacatcttgatcctacctcctcctctctctttccctatgtgtttttggaagtaagggggggggatgtgtcctttcatgacaacttggctctcgccttctctccctctctcctttctctcagtctccccctttttcccccttatccccctttcttccttcccttaaacttcatcacgtttttgcttgtttcatattcaaatcacggctttctcatacaattactacttttttcctagagtttctggttgccttttcttattataagaatgtttaaaactgtgtccttaatcaagtccatgatgtttttcagctcattatatctcctctttcttgctctgaacccatttggttctgtcctcagtactttaacatcttgctgggatttggacccacctttttctaggcctcctgctcaagtcatcctctaaatctcttttatcgatctccaggtttaatctaaaagtgtattctttctcaggtttcactctcattgttccaaagctgaccaaggaaatatatgttgggaacaagctcttcaaggctttaatgttcttgaaaacccctttttttttgccttcatgcttgggtggtttttctgctgtgagaagtgtcttcgtgttatttcttaattttttccctcccactctccctgatggagcttctgtgagtgaggcgagttcccccagccttgtcctctacgctgtcttctttctgtgttacgtttgatctctgtgatttctatcagccaaacctcccacctactcataaaaagttatttcataaatcatacctttaatttccatttttctctcttttttctaattgctatatcctcttgaatgttgtgaggacattacttttttaagaagtgatttttccttcttttcattgactcattctttttggatcttttttggtgtgtatcctccactgtgtgtcgcatgctgaagactgtcctccggtatctgtgattctaagtttccccttgagaaatctcagacatgggagaggctgcctgaggctctgtagtcatgggcagctcctgcaggggccatagtggccaaaatgaggggagctttactctggggtgctggtactttgactggctgcctgtgtttttttgaggtggtttatttttctttaccagtagggctgtgttttaagggtacccagggttggttttaatcaggcatggtgagacacttagacacagaagtgactgtcctgaaggaaagcagttttactcactgttcttagaagcagaaggacaggctaggcgcggtggctcagcctgtaatcctagcactttgagaggctaagtgggggtggatcacgaggccaggagttcaagaccagcctaaccaacatggtgaaaccccatctctactaaaaatataacaattagccgggagtggtggcacgcacctgtaatcccagctactcaggaggctgaggcaggagaattgcttgaatccaggaggcagaggttgcagtgagccgagatcgtgcccctgcactccagcctgggcaacagagctagactccatttcaaaaaaaaagggaagcgtagcacatgcagggacacagggaggcaccagggccacgcgggaggccgagagagtgcgggaaacctgagcaagggccgtccttcattgtggcttctgcaggaaggaagggaggagcagggcacgcaggcttaggtttaggattagctccttagaataattgcagtaggccctggggcatagggactcttcctggttgacttttacctggtcctgcagtgatgagagcaggactggtgtcaaccccagtgtgacagcctgataaaggatgtgtttgggtgggggtatgggttctggattgattgatttgtgtttgaaaggccagagttgtttactatctctccaaggggcctccagagtcagcaaagccccagatgtcaacacatcagaatccagaaaataaaagacaaggctagtacaggctgttggtgtaattgctgttggggctgtgtgtgtgtgggtgtgtgtcctttatcccagttgttaactcctggctgcaggaggctggaacaggggacggagaggggcagtggtgcatccgtctaaaactcgcacttacttctgttgtcttccctcactctccttcttttcatcgctaactgtggagctggaagccctctggggttgtggtgtccagctccctcctgcacctgcagttcagtcattcaagatatatatgtgggccgggcacggtggctcacgcctataatcccagcactttgggaggctgaggcgggtggatcacaaggtcaggagatcgagaccatcccggctaacatagtgaaacccccgtctctactaaaaatacaaaaaaattaaccaggtgtggtggtgtgcacctgtagtcccagctactcgggaagctgaggcaggaggatgacatgaacccaggaggtggagcttgcagtgagccgagatcatgccactgcactctagcctgggcaacacagcaagactctgtctcaaaaaaaaaaaaaaaaagatatatatgtgaagcacaaaccaagtgtgggtccgcttcaagaggctggaactagagctttggacacagcgagtgaaaaccctgccccatgaggctcacagggtggcagcgtgcctcacccaccctctgttcttctagacaccatgaaaatgtcacatctgccgatgtcctccagagttgtttacaggtttcatttggttaagagcttggttttatatacattgtgagaaaaatcaccagttcggtgtgaaaattgaaatgggggtagacactggcccttccaagctgtgcccggggaagacctcccaggccagtcccagtggtgctctcaggcagcgtgtggggttgtgaggacagacaggggcccctctcaaggtctttgctgctccatcaaagacagaccccagggcttcgggaaatccacagcctggtggcactggctcatgcagtccttttcctgtttctagtgctgatgagcgctttgacgccacattccacactaacgtgttggtgaattcttctgggcattgccagtacctgcctccaggtaagctgcacctcctttgtcctcttccagttagaaaactgaagcgagtttgggtgtcagtcagtctggccggtgcccccgtgtggtggaccagctctttgcttcgcctttgctcactcccacctcttcctctctcttctcttctgtgcttctgtgtgctttctacccccagaagtccatcctcctcttttgtctcaatcaagccgtctttgccactatgtccttattttctgccatgtgtgccttaaagccaatgtacaaatacagcgagtctcctttgccgggcagtggccacctcaccttccagcctggcaagccacctctccaggctctgcttctcagttccagcttgccatcctcctccctgcgggactcagtgtcttggcaggtgcagcgctccagctgccgggggtgagatatgacagttccaggatcctgagtgcgtgcgctaaagagcacacgcaggttacaggcaaggtctggtggtttcaagggagagctctctagcggctgacttcttcccaacagtgtctcacctccaaggctaagtgctccctggattggttctttcccaccagtccatcttttcagtcgattcacagggcaagggaaatgggtttatggcctaaaggtgcatgcagagtgcgcactagcatattgataggaacagctggggtttttgatcttttagaagatttttaatgtgtttattccagggtgatctcccacactgcagctgtttaactttctgctcagaggcaacctgcaattacctccacacctaactaccactcacacatacgactcacacacacaccactcacaaccactcacacacagccactcacacataccacacaccactcacccctcacacacaccactcacacacatcactcacataccacccacacgactcaacactcacacaccactcacacaaccactcacataccacccacacgactcaacactcacacaccactcacacaaatataccacccacacaccactcaccactccacacataccactcacacaaaccactcaaaccaccaacacacacacaccagacacacacacacccctcacacacaccacttacacaccactctcacacaccatacacaccactcacacacgactcacaaccctcacacacaccacttacacacatgcaggcatgcactctcaaaccagatacactattcacaccactcacataccacacatactggctgtgccttctcggttgctgtctgagtgccttccctgtcagcaggtgacaagcatctgggggcacagtcagcctttgctcaccttagcatttatccctgaatgaacaaaggagcgagtgaacctgtcaatggtagacacctcccaataatattggaagagattgaagaagtccagctgttcaggcttctcgaagcatccgctttcctgctagccctggcatttcctcctaccagcaggacccttgcaaacaggggtagtggggggagccttccatcactcccgaggtctttctcgccaggcctgcgtgttgcagcttctgttatgagggctattttagaaaacagcctccggtagtcaccagtgtagaatatgctgctgcaggttgtttggaaggctgaggctattttcagctgcaggaccagcactgcaagcctcgagctgcctgagtgcagcagccccctctggagctccaggcctgtgtccccactgcagtggccctggattccggtcaggacaggacacgttgtcttgtgaccatgaggggcttccttacgctggcaggaaaggcccagggccgcctggattgggaaacccctgcctgctccctgggagtgtagaacgagtcccaggatgctgccctgtctgtagttagaggggcatggataggaaagaatgttttgagttcaagctttgaaatagagacttgaccataacatgactttcccccccatttcatgtgtttattttttaacagctttattgagagagaatttacatatcatgcattttaagtacatgattcaacaacttttagtatatttacagacttatgcaaccattaccacagtctagttttagaacattcccatcaccccacaaagatcccttttgcttgtttgcagttaattcccattcctactcccagcaaccactgatctgctttctgtctctagaaattctctgtctgtctcgggccattatttcgtagaaatgggctcatgaagttacaaagctttccaactaactggcagacaaggtgggttttggggggatccaactattaatggagggggattgtctgtgatgattccagattcctataaacatttcatgtaaggacgcaaagcatacttaaaggaacttcaggggacaaaatgtgtatcttttcccaactcggttgtggggtggggtccttgtgtgcaaggctgtggaggcccttcctgcgtgcactctttctgtaactcagtaacagaagtttgcagagtgccagccctgccccaggaacacctggacaccgagtctgtgcctgtcttcttgtgccatgcagccttcctctgggcagggaagagcacatgagtgtaaataactggagtggcctctatctggtttcctccccttggccctctgggaaatccacttccaacctgtcctagcctggaatagctcttttcagcggaaactcttccttcaagcaccatctcttcagcttaaacctatctatctgttcttgtttttgtttgtttgtttgtttgtttgtttgttttaactttttttcttacagacagattctaggtgtgttccccaggctggagtgcaggggctcgatcatagctcacttcactttagcctcaaactcctgggctcaagcaatgctcctgccttagccttctgagtagctgggactacaggcatgcatcacctcacccagctaattttttttattagagatgtctcactatgttgcccagtccggtctcaaactcctagtctcaagtgaccctcccacgtcaatgtcttagagtcactgggattacgggcatgagacactgtgcccagcttgttctgttcttcatctagaatttaaattagttaaaattctagctttaaccagaattctagattgtatttctcgataatcatgtgttcttcccatttttaacctaaagaaaatgcctacctcaccccgcaccaaacagacacacacacacacacacacacacacaccttttagattctatttctaacttcatcatcagggttatcaacttctctgagatattttgcattctttacttttattatttagagtctgaagatgctcatggtaaatgcagattatagagctaactttttgcacaaaaagcccacaaaacagtctttgagagagcatgtcagtgttacgtttggattttaaaagacagtgaagcttagctgagattctgttttacagattttgcgaataaataaaaagacagattccatttgctctggactgtgttagctgcagtgcggagggcggaaccggctgaaggaactgctgtgtattttcagcacatctcagtcagcttccgtttcagtcttctgtttccatcacccacacaggcatattcaagagttcctgctacatcgatgtacgctggtttccctttgatgtgcagcactgcaaactgaagtttgggtcctggtcttacggaggctggtccttggatctgcagatgcaggaggcagatatcagtggctatatccccaatggagaatgggacctagtgggtaagccatgggactaaccgcctggaagaaagctttcctattcctgggcaagctttaaaagtttgggattttccactgtcctttccggtgcgagcatttattgaattttgcagtagtctccataatttactgagagctacaggaggagaaacagaaaacagttaggatatgccatgctttccaagaggaactggcaactgcagtgaggatgcatttaaacaaaccagtgtgaggatagatctctctacgttatgcagatccactccatttctaaaagcaagttgaacagcaaatttcagttgatgggaacctatatttgattattttaaaataggaaaacagtgattacatttataacagtgtaaaattggtaatgtattatttataattattataatcatgtgtttccaatccaccaaaagaatatgtaccaatttggccaactatcactaaaatactcttaactctatagtaaatcaacaaggttttattcaagctaattacaaccccccccttttttttttttagcactttgcaaactttaggactgtgcttgtgtgtggtatacacattgaaataaacagggtaatttattgtattctaacaatggctccttctctcctcctccctatggaggaatccccggcaagaggagtgaaaggttctatgagtgctgcaaagagccctaccccgatgtcaccttcacagtgaccatgcgccgcaggacgctctactatggcctcaacctgctgatcccctgtgtgctcatctccgccctcgccctgctggtgttcctgcttcctgcagattccggggagaagatttccctgggtaagcgccccagtgtctggcgggagtctgagactggagaccttctgctgagatcagctctggagggctcacagcagacagcgcaggactccatcagggttcctggggattccctggctcatcccatggacctccgagcccacggtggctccaggacaccagaggtccctgattcgggctccgtgctggacggctgtgtaatcctgagaatactggaggaccctcagaggatgggggatgcacagggagggggccagctccattctgccttgagaggcctgtgctttcttccctcctgccaccccacctgttcctcaatggcgactggtcatcgagggaacaatttagcttagtatcagcttgcatttgtatgttacagtacccagtgtaattcttacgatcactcccatacgaagctaaggaaaccaagattttgaatggtggaatgagtttcccaatgtcttaaagagttgctaaacatcagatgtagcatatggtagaaatcattcccaaacccatatcttctgagtatgaggttcagaaaggttgaatgttgtatctaaggtcacatagctagttgagtagcaaacgtaagacctgaaatcaggtctcctgactgcatattttctttttcctgctacgtgaaactacttctcaataatattttacagagaatatgagagataattgtgccaagttaaatttttcagtttgtgttgatgcttttaaaattctgggtcctaaacttgtctccataagagactcctttgggactctggtaagtggcatggaatgtcccctggaaaatgcacacgcccatacatagggaaaacgtgcattccacgacattccccccagcgcctccctttcttttgagtgtcaggttaggagccctcgttagacagaattgaggccttcttgtctgtttttgtctgaggaaccgctgtgtgtttatgttttagggataacagtcttactctctcttaccgtcttcatgctgctcgtggctgagatcatgcccgcaacatccgattcggtaccattgataggtaaggcaagagttgggctcctctcttagagatatggggttagggttagagtgtgcccaggatttcccagcagatgaaactagaagaaatagggctgcactgcccccattttctctggaaggtgatgatttgctgtaactattcagagtcacccaggcccaagtaaggggaaggggatattcagctttgaggtttgacttttatctcacagaaatgccccccttcccctcataattctcctcctcatgcttgctttgaagccagatatttcatcgttagagatgcatcattttagcttaagatgttgttttcccacaaagcctttgttaaaatgggagaagcacacagttactgtgtcctgagataactcaatgtctctgtataaaagtttctagggaaatatgaatgagaaaaatatattttgcacaggtataaggcatgatcctctacccagggagggacaacaaaaacaagtctccactcccactgggcagggaaggttggaaggaggtatacagactgtcattacacctgctggcccctgctgtttgaggacctatgctgtgtctacctgggggtgggctagagggagagccctacctggatacccccaggctttaggaaccaagcagcaaaggcccttctttgtggaactccctgtatgtgcagtattttggccagagaaactgttggtatgaaaagcctttgtgggtatcatttttctcttggtaccatccagacagggaagaaccacctttccacctgattctgactccattctttctaccttccagcacactgctttcagtagagatttgcagcctcccttccgggggcagttgtcaggccttctctctctggactgatgacccgctgggaaaggcttggttggtgcatagcccacatctcgaaggatgggatgttgatggccccagggacatcagctttgctgccctctgttgatggaaattcagtctgggcaatcctttgacccccatctctccagaggtggttggtctgctcaggctgccgtgacaaaatactatggacttaggggcttaaataactaacagaaatttattttctcacagttgcactgctgaaagtccaagaccaaggggccattagggatggtttaacctgagacctctccccctggcttgcagacaaccactttcacaatgctttgtcctcccctggtagttcctctgtgcacctgcatccctggtgtctctctgtgtgtccaaattttctcttcttcattaaaagaacaccagtcagattggattagggcttaccctgatgacctaattgtacttaattacctccttaaagaccctatctccaagtacagtcacattctagggtactaggggttggggcttcaacatatgaattctagggggaagcataattcagctcataagggtcacggtttgctccagtctccttccttttctcaggggccctgatgctaactttaggtctcaaacttccagctctggcagagctcctcccaggtacctcttggtctttgtaggaaggcagtgagttccttcctggcgtgagggcctgtgagggctagctgaatgcttagcgccctgtaccctgatgctttccgcttagagttcagccccttgagtggacagccacaccaaaggtttaataattagagctgcccactaaagaatgccccctcctttctcctagacatcttggcctgtgtaattgctcatcattgcacaaatcctgcaaggaagaagttcctattttaatggaggctaccgtaacaaattgctgtagtctgggggcctaagcaacagacatttatttctcagagttctgcaaggctgcacgtcctcgataagggtggcagcagggctctggtgaggggccactccctggtttacagctggccctcttctcgctgtggcctcacgtggcaaaaagagagtgaattagctctttagcctctttttatgaaggactctaatcccattcatgagggctgcaccctcaggacctgttgaaggcccctgagaaaatcactcaccatttctctacttacacaacacttctgacaccaaagcggggcgtttctcccacatcgaccaattcttggaaaccagctgggcgtcctacagtgagttcacttcagtcctgacaccacctggagttagcacagcactcacagattaaggctcacaagaccatttctacttgagatgccagttagaagttccggcttcccatgcttctgaccaagtgtctataaatcggggagttcccaaaagcacatctttgagttcagccatttactagagtgactcactctagtaaactcagggaaacattttactgatatttattcattaattataaagcacagatgaatagtcagatgaaagaaatgcatagggcaaggtatttgggaaggggcatggaactgccatgccctctctgccctccaaacacctccccgtgttcagcactgggaaggtctccacagaactccatccttttgggtttttatggaggcttcactacataggcatgattgattacatcattggccactggcgatccactcaaccgtcagtacctctttcctccccaggggtcaagggttgggagaggggacagagcttgaaggttccaactctctaattacttggctggttcccctggcaaccaaaccccatcctgagggtatccaggaacctcagccataaatcatttcattagcatataaaaagacactgatgacttcagagattcaaaggttttaggagctgtgtgccaggaaatgggaggaagactaaatacatatttcttattataaatcacaatctcatacctcccaaagccccacctccagataccatcccagttaggactagggttttaacccatgaacttcgtggggacacaaacgtcatcctttgtaccacccccattggagagctgaggcccgaagaggctgagcatccactccaaactcacagccagtagctagtggaccaggatggaagcactcagatgctccatgctgcccctcacctgggcccaggtggaaggacacccatgacccattagaaccaaagctgagactgaagttctcgtcctgaaaagtccctgccactgaccccttcctcaggctggacagctggcagccaggtggtgtgcaggtttgccctcattgtgcccctggagcacagtagaggcctgcatcatgaacactggatggttcccatgccctcacatccagtatttacccacaggaacaagcttatcaccatcctgccaggcgatgctagctcttattgactgacaagtcggccagagtgcatggaagtgcaatgaagtgagggaaggtcactccgtgggcgggaagtcagaccacactggctggttttgcccacccagaatgtgggctgcaggcctggacacatgggcatcactgcaccctgaggccctgacggtcagagaacctgatcagggtgtgcctgtcctgtgacgtgcagtgccacaggatccccgggtctcaccctgcatctgttctctccacagcccagtacttcgccagcaccatgatcatcgtgggcctctcggtggtggtgacagtgatcgtgctgcagtaccaccaccacgaccccgacgggggcaagatgcccaagtgggtacgttcctcccacccccgatggagtcggagcccccctgtaaaggaggctcctcctagggtttatttttaaaatcacacaaaaaatgggcattcctaaagaaatagctttgggttttttgtttgtttttttgagacggagtctcactatgtcacccaggctggagtgcagtggtgtaatcttggctcactgcaacctccacctcctggattcaagcaattctcctgcctcagcctcctaagtagctgggactacaggtgcctgccaccacacctggccaatttttttttgtatttttagtagagatggggtttcactatgttggccaggctgatgtcgaactcctgacctcgtgatctgcccacctcagcctcccaaagtgctgggattacaggtgtgagccattgttcccagccagaaatagctttgtttctgtatttcgtcacctattgacgtgtctttgtgtagtgtgcagtcatggtgcacgtgttcccggatgccccgtggcactgctgtctaatctaactgcagagtagagtaaggctctcaaactggctgccctgtgtgttctatcaatcagcacggtgttttgagaagctagtttgttttttgatgcatgccgtgaagcactgtgctgcagttggaagcaacagatgagacagatgcgtagcaacatggttgaggcttcacaacagaatgaggagcaaagagtaagaaacggaatgagctgtgtacaaatatgtacgttcagtacatctagggatatcatccaaccagaagtctatgaaacaaagactaattgtcaccagtgcagaagggggaagggataaaaggaaacggatgaaaacagaaaggatggcatcccacagcctgtcagcttagcctgggccataccactcctgccccagctgctggcaccgtgcccggccacatctgcggatgctcacccacccagggatcctctcctgcacggtgtccagagctctgcatccacccttgcctggcagtcaggaaaccttgatgagggcctagggagggcctgagcttcttcccctcttcatgtgagctttgtaaagcttccccgtcctcctgtctagagagcctggcctaaggatttggggagctaaaaaggccctcacattccaaaagttgtctgtctttggagagcacttgtgtcccagttcagaagggaatctaggaatcaccaacaagctaaatgcagctgtagggggtgagatgctgtcaggcaccctccaggaataggggattgctgggcctcctgaaacagtcattgtggagttgttacctgaatgctcacttagcaaagactgcttcttaagaaatgctttacaaaattactgtttcttctcagagtttcacccacatggcccattccccttatacactatttagtaaagacttacctgtgagcccaccacagtggtgtgtggctgtagtcccagctacctgggaggctgaggtgggaggatcatgtgagcccaggagctccaggctccagtgagctatggtggtgtcattgccctccagcctgggtgacagagcaaaactccatctcctaaaaaaaaaaaaaaaaaaaaaaaaaaaaaaagactgacttgtagctcattacacaagcagtaatgtgagctcagcctacatggtgatgtctcacacacagaccacatcactacattccctgaggcttgttttgtgaaggcccccccttaaaacactggggtacatttgcacacattcacctgtatttttgtctgatttccttataacgctgacccacacttaagaaaatgcaaggccagaggtgagaggcctgagagctggaggcttgttggtttgctgctctttctgtctgtccatccatcagtttgaagcaggtaatacatttacctgtttctaaagtcaaaataaaattaaaattatacataaggaaatcctgctcccattccttcccctttaccctgcatctaccgtcaatactgataaccgttttaatgaattccttatttttccttctagtatttatttatgcaaatacaaaaatctaaacattctcatttcttgtaagtattttgactgatgagaagataagagaattaagacattgagacacaaaaccatttttaacgacctggagcactctactgctctagaacaatcttaattaagaacatatgctaattattcacctctcagcataaaagcttattaaaaccaattggctgcaaatgaaagatgaagcttatgcatttctctcgctttatatagcacactgcatttttctttcattccatgtgtatgtgaaacacaaacagcctccgagggacttttattatgatctgttgctatgaagaagatactgccgggtgcagtggcattatgtgacatttgcacagccagaaacaaaactgtagcctaacagaagaggtcaagagcacagtttgaggagtgccaagaggataattttatcttttaaatgctttggctttgaaagttaatgattcaggccatggaattcaaaatggacttggcagagtgtatcgtatgagcttgagatgtgcactgggggacgtgtagaccctgccatggagggagaagtgcctggtgctgctcgctccctgtgtgcactgctgccactggatgcaggcacactcactgccctgcagcctcccaggagagctggctcaggctttctggtgccttcccagaggggtggggttgtgcgagttttgaagagaatcttacagaccctttgacagatgagactgggaaaggctaaacatgtgaagtgacataaccacttacttactcattgtacatcgttgggccagtttattagcctctttgaacctcagtttgttggtctgtaaagtgaggggattatactcatttcaccggaccctgaaaggcccaagtgagatgacttgtctcatgagccttgtatggacggcccaactcacccaaggtttcacctggggccatatgtccctgctccttactgatcataaaaaaccctccaaggtcagcagacccaacctttccaggacacgcagagtgccgcctgcttgtaaagtacaatgggaaacaaagggttatttttatagctgcaatgaaactggtcttgtgcttccctgttcttgtccccagacctgtttgttgcagttatctttgataagatgttataaaaagatgaccaagaatgaaagctctgcagatacgaactgcacaatttactatctgtatatttatttcctaaagataggaaataaacctgttaggttactgatggaatttccccaaaatcataaaacaaaatgtaaatgaaatcaggatctggataatttcagggaaaaggcccacttttcatacactttacatggatgggcttgcaagaatgcttctttacctggattgaggcttcagttgtctctcttctttccatgagaggcaaaaccaggataaactccatggtgatttttctccagcttctttcatgcactctaggacacactttagaccagaagttagcaaattatggcctaggtggccaaatccagtccaccaagtgtttttgtaaataagttattttagaaaacatgcccatccatttgacgccttcaatgtgtgctacatcagcagaagtgagtagttgcctggccctttacagaaagtttgccaacttctgccttcaacttttcaaagtactctcccagacatcatcttattcggtcttcattgaagcctactgagttaggttagaggttccgaaactgccttggttcacagcacgttagtatctcaggaaatttttcacagagcccctggccaaaagaaataatacccaaggctctctttttaaatagatcaaaacactttaataagtatttatgccttaacaatgtagcacctatggggcacggcaccgcctctcaaatcttgggatcagattggagaccactaacctagtttctgtttcacatgaagttccttggtgtttgctttttatcagggtactttgaaaaacagctttgcaaagtggtcacgtcatcacaagagatgtggtaatctgatgttggaagcctgaagtgcttcaagcttcaagtttacctggtgtctcatggatatcctgggattgcatttgaaaatgtacaacctcccccaggcactctttgcgaatttgcagtggccttccagggcacctaacaggtagtgtgggagccagagttagatctgaaggtccccgggttacagatgaggaaggatcagagagggaaattgactttccctctttacacagctcagatagccttccccttccacgaagctgtcctccctgagattgcagtgtgcctgccccggagaacaatttagcttgttcccagggtgcatcagttttagtcttgcctcacgttgaactcgactgcttgtcatacgcaagcactgcttgcctgctaaaatcatctgggaggcagtggaggctgctacccccaggaccaatgaagcagggcttgtattgtaggatcttactgctgttgggatcagcccgtgtccgcctcagggctgctcttaacgttctgttgtctccccagaccagagtcatccttctgaactggtgcgcgtggttcctgcgaatgaagaggcccggggaggacaaggtgcgcccggcctgccagcacaagcagcggcgctgcagcctggccagtgtggagatgagcgccgtggcgccgccgcccgccagcaacgggaacctgctgtacatcggcttccgcggcctggacggcgtgcactgtgtcccgacccccgactctggggtagtgtgtggccgcatggcctgctcccccacgcacgatgagcacctcctgcacggcgggcaaccccccgagggggacccggacttggccaagatcctggaggaggtccgctacattgccaaccgcttccgctgccaggacgaaagcgaggcggtctgcagcgagtggaagttcgccgcctgtgtggtggaccgcctgtgcctcatggccttctcggtcttcaccatcatctgcaccatcggcatcctgatgtcggctcccaacttcgtggaggccgtgtccaaagactttgcgtaaccacgcctggttctgtacatgtggaaaactcacagatgggcaaggcctttggcttggcgagatttgggggtgctaatccaggacagcattacacgccacaactccagtgttcccttctggctgtcagtcgtgttgcttacggtttctttgttactttaggtagtagaatctcagcactttgtttcatattctcagatgggctgatagatatccttggcacatccgtaccatcggtcagcagggccactgagtagtcattttgcccattagcccactgcctggaaagcccttcggagagctccccatggctcctcaccaccgagacagttggttttgcatgtctgcatgaaggtctacctgaaaattcaacatttgctttttgcttgtgtacaaacccagattgaagctaaaataaaccagactcactaaatcctttccaataattgactggtggaaggaaaacaaaaaacaaaaactaaaaacctcttagcttttctgcaattcaactttttatttttatttttatttctatcaaagacggtagagagaaacagcttgatgctgtttctacattaaaaaaaaaaaaaaaa

SEQ ID NO: 53 - DNA, 4110 bp, Homo sapiens
aaaaggcacaggctgggcacagtgcctcacacctgtaatcccagcactttgggaggccgaggtgggtggatcgcctgaggtcaggagttggagaccagcctgaccaacatgatgaaactgtctctactaaaaatacaaaaaattagctgggcatggtggcaggcacctgtaatcccaagtacttgggaggctgaggcaggagaatcgcttgaacccaggaggtagaggttgcagtgagccgagattgcaccactgcactccagcctgggtgacagagtgggactgtgtcggaaaaaaaaaaaaaaagaaaagaaaaggaaagaaaagaaaagaaaaacgcacagaaattttaaccaaccaggaggcaaccagactctggggaactttcaagatccttatcacaatttcccaccccacccaccctgttacttcctctacttttctctctcttgttgtcttgtcttgaccctttgtgctgcaaaatgggtacccatacatggggctgggggctttagaccagtggatgggtctcagtccacacaaacagctaatctggatacacgaggccaaaaccttctcatttttctgggcaactttttttcctggcccaaaatgttttgattgttgttaactcacaggagtggggtagaccattaaggctaatttcaggcccaatattgtcatttttagaggagaaaagtggaaaccctgggcacttgcctgggtagtggctgaaccagaggtgacaccttgctcagtcccagcacagccccaccatgcacccggcaccacaccaggcactcaccctcttatacaacaggacaggtggcgtgtttgtgaaactagtggaggtttgtgttcaggaggtggaggagggaggacaggaaggagagggagaagagcatgcactggagaagtaaatccagggatcacacacagccacgtcctcacaatgcatgcttgagatcagtgtttgtactaagggcaatggggagctattgaagactccaggctggaagcaacacaggcaagagtgtgtcttagaagcatctctgttgcatttggtaggctgagatagaggctaagctgaggctgttggagaactcaacagcggagggtgttggcttgaactaaggaagtatgttgtgtaaacgggagtgctgtgacctgttgcagtcttactttcccactgacttctatggagtatcagtttcctgttgcctctgtaacacactgccacaaactggactttagaacaatagatgttcatcatcgctcttcccaggagtgtccggagggaaccagcccctgccaacacctggaccttaggacctctgacctccagaactgggagagactagatgtgtgtggttggaagcctctaagtcagtggtcatttgttatagcagtgctaggggcactaggaaacaattaccagaggcaagagacaaagtcttattagctaccctcctctgaaggacagaaaggaaaatatgagaccaggagggtgttgagagccaagtggattgaagtgaaggcttggggctccttgtggattttgtttgtgtgggttattttgttcccaggagtctcaggctgtgtagccaaatgcagtctgcagttctactctttcctttctttgaaagcaaacagcctcttttggaagagtgaagggcacccgaggttccagctggggctggcccaggccacggagctctcagaatgcgtacagcgcagacagcaccctgcagttgggtgggtgctggctttgaggtctggagatctagatgcccacaaggtgcccctggcaagtgggggctgcaaaggcatcacccaccccactgggctggggcagagaaatagacatgatgcatctgatgagctcggaaaacatttctaatgtatttattttttgtggttcggctacagaagagaataagaaagggctgaaggggatgaatgaacaagagcaggagaaggactgccctgagggcaggaggaaagggtgtgaatcgggatagaagtcagaaccccaccagcttcttgcctgggaaccaattgctggagctgcttccttccttcgttcattcctgctttcttcactccttcattccctgaacatcagacatggtcataggccctgctgagaattaaaacagaacaatgaacaagtcccactctcagaacgcaggcagaggtgaaatgttcggtgggctatggtgatggctttggagatttactggtagcttctgtggggttactctggctggggaccccaggggcctgctatggacagaattgtctccctctcaaatttgtatattgaagtcctaacacccagcgtgatggtatttggagggggggactttggagggtgattgagtttagatgaggccatgaagctgggaccccatgatgggattggtgtccttacaaggagaggaagaggctggagctccttctctcaccttgtgaggacactgtgggaagccacctgcaagtcaggaagggccctcatcagaagccaagtcagccataccttgatcttggaattccagcctccagaactatgagaaacaaattcctcttgttgaaaccatgcagcctcagctggtggaagcgttcggggtgagcatggctcctgcagggagatggagcagggacattgtgtcaggtctaaggctgctggtagagcctcagcttcctttccttggcactcaccaggccatgctgggaaagaagtctgagccaggtagttcggaaaacacccccttggtaactcttttgggaaacggagacagacatcaaggtcttatccactttgtgcaggaagatgacatgcggtaataaggaaaagaaaatgggaggtcctctgtctcatggaatttggggtcacaagtgtctgtacaacaccttactgggtctcaactcccagcttctcaggaacaagagacaaagaatataggtcagcagagcagagcccgaggggctggtccacagtccaagtcacacatgatgaggacagtattgagagtcatcacatgatgatggcagtgatggtggtagtgatgatggtggtgatggtgatgatggtggtgataaaggtgccaccggcgtcgccgccggcgtcactaccggcgccatcatcctcatcatcatcaccatcatcactatgaccatcatcaccattacctccatcatcaccaccatcaccacatcatcatcatcaccaccaccatcatcaccaccaccatcatcaccatcattaccatcattgtcatcaccaccaccaccaccatcaccaccaccaccatcaccaccaccaccaccatcaccaccaccatcactatcattaccatcatcatcatcaccaccatcatcaccaccatcattaccatcattgtcatcaccaccacggccatcatcgtcatccaggtcccgtcattactatcatcgtcatcaccaccgtcttctcctgcttcttctccatcattatcattgctgctgtcaccaccatgattatcatcatcatcatcatctccattgttctcatccttcttctcctccatgtgcctctatgtcttcccatacctttaacatgggttccatgactccttagcatggctgccatcatcatgtggatgtggatggtggtggtggtgatgatggtggtgatggtggtgatgataaggatgatgatattgattatgagagttgtcttagtccatctgggttgctttaacaaaatactataaattggaggccaagcatggtggctcacacctgtaatcccagcacttcggaaggctgaggctggaggatcactttaggccaggagttcgagattagcctgggcactacacaggaggatccatatctctacagaacattttaaaattagctgggtgtggtggtgtgcacctgcagtctcagttactcaggaggctgaagtaggaggattgcttgagcccaggaggttgaggctgcagtgagcaatgatctcaccactgtgctccagcctgggtggcagagcgagaccctgtctctaaaaaaaaccaaaaaaacccataaattaggtggcttataaacaacagaagttcctttctcata
